United States Patent Application Publication US 2024/0271161 A1 - sequence listing, part 6

SEQ ID NO: 62791 - protein, 555 aa, Salinispora arenicola
MGPPTATTPPPDLSEGPPWQAIPPPPAHRSGVDDAPPTPPPEDSTGPCRVCIYIRRSTDDEHQPFSLLAQRTALKKYVDNHPGWVIVCEFEDDASGATTERPGLKKALDAAKAGLYDVLLVYRVDRFSRSLAHFVDLAATLDAANVRFSSATEPVDTGGAIGRMMLQFLAVFAEFERNMIIDRVKSGMTAKASKGQWAGGTRPYGYLVDRDTQRLVPHPDEAPILRDIFHLYTRDRLGTRAIATDLNARGIPNRTGKQWSGHTINRILDNPAYTGDIAYRDVYVPDAHKPLIDRDTFRRAQDIANARGDIQTQRAKSDSDYYLTGLLTCPQCGQRYIGTSAKGRNRRYRYYTCFTRTRYGKHATCTAPRLPADDLDHMILQALHDFYTTAEPVLAAMIERANSQHDSTTDDRCAELTAIARQITTTEKAIDRYHTAFENGTMDDATAGPRIRELRHRLAQLQARHTELDAGLTSQPEPPPPGTVARIRDHLSTIMTSGSTTERKAAIETLIAEVQLTDQGVVPVFKIPTDTTMPPPETDEGISKEPPVRTMVRSV

SEQ ID NO: 62792 - DNA, 50 bp, Salinispora arenicola; identical to SEQ ID NO: 47437
  source 1..50: mol_type = genomic DNA

SEQ ID NO: 62793 - DNA, 40 bp, Salinispora arenicola
  source 1..40: mol_type = genomic DNA
gcacaacgcgtcacgttgtggagccgaggggactcgaacc

SEQ ID NO: 62794 - DNA, 50 bp, Salinispora arenicola
  source 1..50: mol_type = genomic DNA
ggttcgcacaatggtgcggtcggtgagccggaggtaccaccatgcgaacc

SEQ ID NO: 62795 - DNA, 40 bp, Salinispora arenicola
  source 1..40: mol_type = genomic DNA
gcaccacccgtcttgttgtgaagcccaggggcctgcagag

SEQ ID NO: 62796 - protein, 438 aa, Microbacterium paraoxydans
MCVSTKAAIYVRQSVNHPEGIARSIQKCEALVKERGWTLVDTYADNAVSASKSRDSARWADLLRDAKAGKFEVIVGVDLDRLTRTIRDLVALQDSGAKVLTVNGEIDLTTAEGELRANLLTSFAQMEVRRKGERQKRANADRVMRRGLPVPGKRRYGFEPGNVVERPEEADRVRWMYAEVLDGGSIFGIAKAMGRAPVRIREILSNPSYAGYVVYDGERYDAAPEVARIVSRDDFEKVQAILSAPERKLSPGNQIKYLASGIARCGVCGARMVKQSQNYLCKANLHHPTIKREILDEVLCWSAFDYLQHVEPSSEPEELQEAVQALAEAQRKRGRVQELYEDESADTTSLRKRLAVLAREIDRLAVKVDELRVSTVAGDVVSRIREQLDSTLTDQEGADWWEQTWKDLPLADQREVLLNLDIRVYHGRGADRVKVQLP

SEQ ID NO: 62797 - DNA, 50 bp, Microbacterium paraoxydans
  source 1..50: mol_type = genomic DNA
cgacgcacacaacttgcgattccgtgccagaaccgtaggctatgtgcgtg

SEQ ID NO: 62798 - DNA, 40 bp, Microbacterium paraoxydans
  source 1..40: mol_type = genomic DNA
ccgcgatcagtcgattacgcgcgaggaagcgccaccgcgt

SEQ ID NO: 62799 - DNA, 50 bp, Microbacterium paraoxydans
  source 1..50: mol_type = genomic DNA
cgacgcacacaacttgcgattccggcccagaaccgtaggctatgtgcgtg

SEQ ID NO: 62800 - DNA, 40 bp, Microbacterium paraoxydans
  source 1..40: mol_type = genomic DNA
ccccggccagtccaggacggccgcagaggccccacctcgt

SEQ ID NO: 62801 - protein, 464 aa, Lachnoclostridium sp An169
MHKKILRCAIYIRVSTSEQMIHGKSLEAQRQYLEQYAKEHGMIIVGIYADEGKTARKELKKRKAIRALLEDVKAGKIDVILFWRLDRWFRNMSDFYKVQDILDEYGVRWISASEPGINMETRDGRLQLNVVLSIGQNEVDTTSERIKFVNEASIRQGKVIFGDCNMPRGYKVGIVDGKKCMVKDPEQEEMVNAFYDYFEKHQTKQGTLRYMQRTYDPNFSYSMLRTMLSSEFYKGTYRGIPYCPAYVSEERWARLQEISCRNIKKASSGRIYYFSGMIRCPICGQILCGTGCKSVVNRRTGEKRDYCYYRCNRAMIDRICTNRHRLSQNLIECYLLDNLEHEYEQCRIRVNNIQKRKAENPVAVRTEKQIHKEMERLNYLFQKSRITRDYYSKEYDTLEREINALSHVIIEPEPDYSFIESLLKKNFREIYQALTAENKRTFWHNTIRQIHLKPDCTVDYVDFL

SEQ ID NO: 62802 - DNA, 50 bp, Lachnoclostridium sp An169
  source 1..50: mol_type = genomic DNA
ttttcgcctaactttctaactccgttcggggatcgcttcataggcataaa

SEQ ID NO: 62803 - DNA, 40 bp, Lachnoclostridium sp An169
  source 1..40: mol_type = genomic DNA
acttgatctcgtgtgcggattcggggccgacaagaccatg

SEQ ID NO: 62804 - DNA, 50 bp, Lachnoclostridium sp An169
  source 1..50: mol_type = genomic DNA
ttttcgcctaactttctaactccgaacggggatcgcttcataggcataaa

SEQ ID NO: 62805 - DNA, 40 bp, Lachnoclostridium sp An169
  source 1..40: mol_type = genomic DNA
actagatctggtgtccgggaaagggaaggacaaggagatg

SEQ ID NO: 62806 - protein, 540 aa, Enterocloster bolteae; identical to SEQ ID NO: 44151

SEQ ID NO: 62807 - DNA, 50 bp, Enterocloster bolteae; identical to SEQ ID NO: 44152
  source 1..50: mol_type = genomic DNA

SEQ ID NO: 62808 - DNA, 40 bp, Enterocloster bolteae
  source 1..40: mol_type = genomic DNA
atactgcgtctcatgaaggctggcgtccgaatggcttccc

SEQ ID NO: 62809 - DNA, 50 bp, Enterocloster bolteae
  source 1..50: mol_type = genomic DNA
gggttgtttaccgcttcaaccggggccccggttagatcggttacataccc

SEQ ID NO: 62810 - DNA, 40 bp, Enterocloster bolteae
  source 1..40: mol_type = genomic DNA
atggggagtcccatgaagggctgcattaggatggcttcct

SEQ ID NO: 62811 - protein, 555 aa, Corynebacterium sanguinis
MSTTSARTPDPVRSLIEPPQGTALAVSYLRVSTKEQAEKGGTDEGFSIPAQREANRRKAEQLGAVIVKEFIDAGESARKADRPELMRMIQYVKRNRVAYCIVHKVDRLARNRADDVTIHLALQEAGVMLVSATENIDETPSGMLLHGIMSTIAEFYSRNLATEVIKGMTQKAATGGTVGKAPIGYLNIRSRDELGREVRTVQLDPDRAPLIEWAYKAYASGNWTVSQIHDELTSRGLVSLPTPKRPSKPLAVSSVHRMLTNPYYKGDVIYRGVAYKGAHQPLVPAEVWYQVQSVLTAHKSASEATQVHDHYLKGTVYCGACGSRLIVSNAKNRHGNVYPYFVCSGRHSKRTDCTRQAILIEDVEHLIENYYQRVQLTPARREALAGMLHHEFDRLMSAEADELAQLTANRDRLEHEQDRLMQAHYADAIPLAVLKREQDRIAGELDQVNRRLDAHHGEYTDARAHLDDALNLLENCADIYARCDDANRRLCNQAFFTKVYIEEDDELRVENNRPFEMLLDPEVNADALTWAENADKARTPALDSSGQGSSLVRWV

SEQ ID NO: 62812 - DNA, 50 bp, Corynebacterium sanguinis
  source 1..50: mol_type = genomic DNA
aggttcgagccttgtgcgttgggtgcacctccgtagagagtttgagaacc

SEQ ID NO: 62813 - DNA, 40 bp, Corynebacterium sanguinis
  source 1..40: mol_type = genomic DNA
gtcgcgcgcaacaaaatgtgcccccagtgggactcgaacc

SEQ ID NO: 62814 - DNA, 50 bp, Corynebacterium sanguinis
  source 1..50: mol_type = genomic DNA
aggttcgagccttgtgcgttgggtgaacctccgtagagagtttgagaacc

SEQ ID NO: 62815 - DNA, 40 bp, Corynebacterium sanguinis
  source 1..40: mol_type = genomic DNA
gtaggagccatcaaaattcgactctggtgggactcgaacc

SEQ ID NO: 62816 - protein, 558 aa, Nocardia elegans
MANVLGRIRLSRVTDATTSPERQREDITKWADANGHTVIGWAEDLNVSRAVDPLKAPDLKPWLEPDTAQGWDILVGAKLDRIATGSIYLNRVMDWCTSNGKALVSVSENFDLSTWVGRMVANVIAGVAEGELEAIRERNTSAFRHNLKAGKWRGGVPPWGYVPRQDEDGTWRLTQDNVQVAVIREVVERVLAGERLRSIAHDLTSRKVLTPKDRFAQLQGREVKGYEWHSGPLKRSLTSKTLLGYAVTREPLLDSQGRVRRTETGTKLFGPEVVVTNDDGSPVVRAESVLSRDQFERLGAELRAHENVRETTKRSTALGLQVVFCGVCGQPAYRLKGSEGRKPRYRCASAQYKSQCSNRTITCSEADEAIEKPILGLLGDSERMVRVWNSGSDHSAELADINGMLIDLTEQLGTGMFKPGTPQRQRLNERISGLVARQSELSQETGIPAGWVWQPTGEKFSDWWERQDTDTKNVWLRSMNVRLDFKCSARGNRTVVDSVNLDLGDIQTLVRELKPRGAVAGWQSVFAEMTKNGVRHMEITDNTIRVYNADGSIVEVDK

SEQ ID NO: 62817 - DNA, 50 bp, Nocardia elegans
  source 1..50: mol_type = genomic DNA
ggggtgtaaaagttgacattggcgtattcgatagttcacgattacacccg

SEQ ID NO: 62818 - DNA, 40 bp, Nocardia elegans
  source 1..40: mol_type = genomic DNA
ggcgatcgtgccgatggcgtattcggcggtactcatccca

SEQ ID NO: 62819 - DNA, 50 bp, Nocardia elegans
  source 1..50: mol_type = genomic DNA
ggggtgtaaaagttgacattggcgtcttcgatagttcacgattacacccg

SEQ ID NO: 62820 - DNA, 40 bp, Nocardia elegans
  source 1..40: mol_type = genomic DNA
ggggatcttgccggtgccgtcctgggctgtcctcagctga

SEQ ID NO: 62821 - protein, 534 aa, Mycobacteroides saopaulense
MKPRALIVVRLSRVTDATTSPERQVTACRELCATRGYEVVGVAEDLDVSAGKTTPFDRPQLGRWLADPSKFDVIVFFRVDRIVRRLFDLADLIRWSREHGVTLVSATETHFDLSTDFGDIIALLVAKVAEMELEAISERNASAFRHNIKAGKYRGGMPPWGYVPTRDEDSGDWRLVQDPMQVSVIHDVVARVLKGEPLRAIAHDLTAQGVPTPKDRFAQTQGREVSGYEWHSFPLKRALTSPTLLGRVVTREPLLDAQGRVQRDTKGRKVFGPETVVVGDDGSPVIRAEPILSREVFDRVGVELSGRENRKEPTKRSSGLLLRVIYCGECGRPAYRLKGGTGRKARYRCASAQYKDSCSNRTIALEWAESELERRILTNMGPMERKRRVWFPGNDHSDELSEVNEMLSDLTDQLGTGAFKRGTPQRVRLDERIKSLTQRQEALASLPQEPAGWKYEPTGELFSDWWESQDTEARNVWLRQMNFRVVWKSHTEGTSTVVDEFKLDGDLTMDLDADQLFGPVVDMVAEFVESEVIK

SEQ ID NO: 62822 - DNA, 50 bp, Mycobacteroides saopaulense
  source 1..50: mol_type = genomic DNA
ggagtgtaaagctcaactttcgactacgcgctagttgaggattacacccc

SEQ ID NO: 62823 - DNA, 40 bp, Mycobacteroides saopaulense
  source 1..40: mol_type = genomic DNA
cggcatgtcaaccgtggagtacgccatcgggacgattgcc

SEQ ID NO: 62824 - DNA, 50 bp, Mycobacteroides saopaulense
  source 1..50: mol_type = genomic DNA
ggagtgtaaagctcaactttcgaccacgcgctagttgaggattacacccc

SEQ ID NO: 62825 - DNA, 40 bp, Mycobacteroides saopaulense
  source 1..40: mol_type = genomic DNA
ccacctgtccaccctggcgcaccccagtgggatgaatgcc

SEQ ID NO: 62826 - protein, 472 aa, Amycolatopsis thermoflava
MTRAVIYCRISSDPTGRAAGVQRQETECRELAERLGWEVVDVLVDNDISAHSGKRRPAYEQLLDAISLGKIDAFVAWHADRLYRRTKDLQQLIDIVNLHKVQIRTVTSGDIDLTTATGRAVAKTVATWNEHEVEHAIERMKLAKSAAASEGRWLGGGRPFGFEDDGVTVRESEASEIVAAVRRVLMGGSLLAIASEWNERGLLTARGKEWSQTTVRRLLLRARNAGLVEYNGEIVGPAQWPAIVPEHEWQAVRRLLSDPSRQTAFTRDRKYLGSGLYLCGLCEDGSTVHAHTGGRGGRPHYRCKKPGRHQLIRGSIPVDEYVTSTVAEILGHLAKDGALRLAPPGSEDLSALYAEAASIRAELDAARQALANHDIDLKSFVVASKQWQADLDAVEARLERHGDRQPLALVMNAPDPVAEFQSDRLPIDVKRAVIGRLVKVTLLRTKQGRLPGGRYFDPASVVIEPRRAGSHG

SEQ ID NO: 62827 - DNA, 50 bp, Amycolatopsis thermoflava
  source 1..50: mol_type = genomic DNA
tagtgccccagcttgacgttcgaggactcgaaagtcaactaacggtggtc

SEQ ID NO: 62828 - DNA, 40 bp, Amycolatopsis thermoflava
  source 1..40: mol_type = genomic DNA
gacgacggtcaacttcgacgatccgggcacctaccacctg

SEQ ID NO: 62829 - DNA, 50 bp, Amycolatopsis thermoflava
  source 1..50: mol_type = genomic DNA
tagtgccccagcttgacgttcgagatctcgaaagtcaactaacggtggtc

SEQ ID NO: 62830 - DNA, 40 bp, Amycolatopsis thermoflava
  source 1..40: mol_type = genomic DNA
cagcagggtcagcttctccattcctgccacctgccagctg

SEQ ID NO: 62831 - protein, 562 aa, Mesorhizobium ciceri
MTAIPRLNCAIYTRKSTEEGLEQEFNSLDAQREACAAFIASQVGLGWKLMPNHYDDGGISGGTMERPALQRLLQDIRDKKVDVVVVYKIDRLTRSLMDFSKIVEIFDASSVSFVSVTQQFNTTTSMGRLTLNVLLSFAQFEREVTAERIRDKIAASKKKGMWMGGVVPLGYRVEYRKLVIDETEAQTVRHLFARYLTLRSVRDLVDEAASDGLSTRSRQLKHGSVAVTMPFCRGNLYHLLSNPVYVGKIRHKDQVYDGEHEPIITSATFEQAQVLLASQAPQRRSHSNVTQAHLLTGLLFDEAGEKLRSVHANKQGVRYRYYVSKQFVDERRKGSEGWRLPAPALESVVEHRLNRILSDQAQLSDWIRQWADSGEIQAAMRRVDEMRSCWASGTTDAKRSLLQKIVRRITLKLGLLTIELDRRSLSELLLDRTLPPNEGAQVTSIECPIGMKRRGVETRILLTDGSNISRELDGALIDLLRRAHLYLGQLTDGAHRSLTDVAMLNGTDASEVSRLLPFALLAPKIAANIVAGDQPVELTAHRLSRLSDLPLAWADQASLLGF

SEQ ID NO: 62832 - DNA, 50 bp, Mesorhizobium ciceri
  source 1..50: mol_type = genomic DNA
cggaaatcgggtggactggatggtggacccggaggacgtcttaaagttgt

SEQ ID NO: 62833 - DNA, 40 bp, Mesorhizobium ciceri
  source 1..40: mol_type = genomic DNA
ggcaccgaaagccaatggtgggcccggagggactcgaacc

SEQ ID NO: 62834 - DNA, 50 bp, Mesorhizobium ciceri; identical to SEQ ID NO: 62832
  source 1..50: mol_type = genomic DNA

SEQ ID NO: 62835 - DNA, 40 bp, Mesorhizobium ciceri
  source 1..40: mol_type = genomic DNA
gggcacagaagccaatactgggcccggcgaggctcaaacc

SEQ ID NO: 62836 - protein, 589 aa, Klebsiella pneumoniae; identical to SEQ ID NO: 47751

SEQ ID NO: 62837 - DNA, 50 bp, Klebsiella pneumoniae; identical to SEQ ID NO: 45382
  source 1..50: mol_type = genomic DNA

SEQ ID NO: 62838 - DNA, 40 bp, Klebsiella pneumoniae; identical to SEQ ID NO: 52673
  source 1..40: mol_type = genomic DNA

SEQ ID NO: 62839 - DNA, 50 bp, Klebsiella pneumoniae; identical to SEQ ID NO: 50629
  source 1..50: mol_type = genomic DNA

SEQ ID NO: 62840 - DNA, 40 bp, Klebsiella pneumoniae
  source 1..40: mol_type = genomic DNA
gcttgaggaaaccatcggcatcactgtgggctctggcatt

SEQ ID NO: 62841 - protein, 494 aa, Frankia alni
MSLLSMSEQDAQVIRVGVAAYGRISRDPGNDQKGVTRQIQDARNEVARHPSWLMVGEFVDNDLSATTGKVKRPRFEALLAAVRAGHIQVIVCYMTGRLVRNRRERLETYELLATHRVKIVCTGGTDLDLSTPAGRLVANILGETDTYEVEQAGTRVSDSHKQAAEEGRPSGGRPYGYVSDPLAPKHHKQRLMHPEESAVVCGMVYRVMRGDSYRSIVLELNERGIRTQHGGVWTTAALRAVLRNPGIAGQRRYKGKVVGTATWEPIIDPGKWAILITLMDARSRPHGWSNRHVHLLSGIMLCGRCLADGKDIPVVCRNDSKIKKRIYLCPGKLGGGCNRLSRHGDPVDAYVEETVVRMLGEAGVIEDLLMADTPDANEVLKIAQGIEACKARAARIGEQMADDDPDDEILAIARKSALDKIRGELDALRQRQTAMSNATAAAGLLGVEDIAYHWQYVMTLAQKRAVVAALLRVVLLPVGKGRTATTDHILIERR

SEQ ID NO: 62842 - DNA, 50 bp, Frankia alni
  source 1..50: mol_type = genomic DNA
gagtgatacaagcgatgcgacgtcgcgacgtcgcatcgcttatgtcatta

SEQ ID NO: 62843 - DNA, 40 bp, Frankia alni
  source 1..40: mol_type = genomic DNA
cacgcgaagaaacagggtcgcgccgtcgacccatcgattc

SEQ ID NO: 62844 - DNA, 50 bp, Frankia alni
  source 1..50: mol_type = genomic DNA
gagtgatacaagcgatgcgacgtcaagacgtcgcatcgcttatgtcatta

SEQ ID NO: 62845 - DNA, 40 bp, Frankia alni
  source 1..40: mol_type = genomic DNA
gatgtgaagacacagggagaagacggctagccatctattc

SEQ ID NO: 62846 - protein, 500 aa, Rhodococcus qingshengii
MDAVIYVRVSHDKKGQGRSVEEQESECREVCADNGWTVREPVVKDNSIGASRYSRAKSRPGFDSLPNILRRGDVLVVWASDRAGRKMEDHLVLRDMCEQLGGVIFCAGGQVYDFSKTADRARAGHEAVDAEQESSRTRDRVVRAVKARANKGDAHGGALPFGYVRTFDPVTGERNWHVDPVAAQLIRDAVETLLAGGSLYSIAELWNSRGMTTNYYVKEKTVNGVVVPAKHGQPWQGRTVRNLLKRPTLAGLRTYRGEIVGPGGNWEPIITRDQHERVCAVMADPTRKGRHGRQAKHLLTNIATCSVCGAGIRYMRNTGAKDQYRCPVGHVGRSAEPVDAWVIEHMFRLIDIWRDQVFFFSDDDEADAADVSGSSLLWEQARALKQRLDALTDQAIAGTISAEQLARATAVLEPQIEAAKAKAQADTIHPLLFRLGESNNDLWKSWTIEERRSLVRAVVDITIHPAINGGKKIRSSDSENRLERPEKSLGIRLFLRHKRV

SEQ ID NO: 62847 - DNA, 50 bp, Rhodococcus qingshengii
  source 1..50: mol_type = genomic DNA
cattcaacgactcttgagtgagtcgggggagtcgcaacgggcatagctaa

SEQ ID NO: 62848 - DNA, 40 bp, Rhodococcus qingshengii
  source 1..40: mol_type = genomic DNA
cacggatcgtcgccgagtcggcgatccgtgacctgctctg

SEQ ID NO: 62849 - DNA, 50 bp, Rhodococcus qingshengii
  source 1..50: mol_type = genomic DNA
cattcaacgactcttgagtgagtcccgggagtcgcaacgggcatagctaa

SEQ ID NO: 62850 - DNA, 40 bp, Rhodococcus qingshengii
  source 1..40: mol_type = genomic DNA
cacggactcgcaccgagtccctcctctgtcccctgctctg

SEQ ID NO: 62851 - protein, 590 aa, Eggerthella lenta
MARKNPKNPDATRPLSCVLYIRVSTKLQVEKGESIDAQRFELTRYAEAHGMRVLGEYVDAGFSGKNVRGRPQFRQMLDNIIKEQPGRRPTYVLVFKLSRFGRNAADTWNSLQMLQDYGVELCCVKDGIDSATTMGKAMLSIAAVFAEMERVNIRTQTMSGREEKARKGYWNGGQAPYGYRLVDRGGKFKELAVDEDEAKVVRKIFQMYAYENKGAMAIAAWLNNHGVRKDARGNATMETFGSTTIARMVVNPVYVGKIAYGRRRTEVIEGTRGETHVVKSDGYEVYDGRHEAIIDEATWAAAQAIVGTRKPNAKRHDDGHVNLLNGLLVCPECGRKMSSHPNRGKVKKDGTRGKTTYAYYCPHTSKARGATCTFSRQYPQEYVDAEVIEMVKLASRSDAFVEALRRRINDETDVEQLREDAERIGRERAANDKRMRMLMNQIDALDPADRSYERKFNDLQRRLDDLYDRDAGFQEALEETQAKIAAADKRRVGERKLLDELDRIPELLEEADEQTRFDIVHEAVSEVRILADRNPRKERVVQSVTFKCPVRFFWEEVPGVADGYTAVTPDSFDVDGNFRDDETHVETIAL

SEQ ID NO: 62852 - DNA, 50 bp, Eggerthella lenta
  source 1..50: mol_type = genomic DNA
ttccgagatgacgagacacacgtcgagacggtcgcgctgctatctcggaa

SEQ ID NO: 62853 - DNA, 40 bp, Eggerthella lenta; identical to SEQ ID NO: 30003
  source 1..40: mol_type = genomic DNA

SEQ ID NO: 62854 - DNA, 50 bp, Eggerthella lenta
  source 1..50: mol_type = genomic DNA
ttccgagatgacgagacacacgtcgtgacggtcgcgctgctatctcggaa

SEQ ID NO: 62855 - DNA, 40 bp, Eggerthella lenta
  source 1..40: mol_type = genomic DNA
ctctcaaccagatttcatcgtgacaaacaggcaggtggag

SEQ ID NO: 62856 - protein, 590 aa, Eggerthella lenta
MARKNPKNPDATRPLSCVLYIRVSTKLQVEKGESIDAQRFELTRYAEAHGMRVLGEYVDAGFSGKNVRGRPQFRQMLDDIIKEQPGRRPTYVLVFKLSRFGRNAADTWNSLQMLQDYGVELCCVKDGIDSATTMGKAMLSIAAVFAEMERVNIRTQTMSGREEKARKGYWNGGQAPYGYRLVDRGGKFKELAVDEDEAKVVRKIFQMYAYENKGAMAIAAWLNNHGVRKDARGNATMETFGSTTIARMVVNPVYVGKIAYGRRRTEVIEGTRGETHVVKSDGYEVYDGRHEAIIDEATWAAAQAIVGTRKPNAKRHDDGHVNLLNGLLVCPECGRKMSSHPNRGKVKKDGTRGKTTYAYYCPHTSKARGATCTFSRQYPQEYVDAEVIEMVKLASRSDAFVEALRRRINDETDVEQLREDAERIGRERAANDKRMRMLMNQIDALDPADRSYERKFNDLQRRLDDLYDRDAGFQEALEETQAKIAAADKRRVGERKLLDELDRIPELLEEADEQTRFDIVHEAVSEVRILADRNPRKERVVQSVTFKCPVRFFWEEVPGVADGYTAVTPDSFDVDGNFRDDETHVETIAL

SEQ ID NO: 62857 - DNA, 50 bp, Eggerthella lenta; identical to SEQ ID NO: 62852
  source 1..50: mol_type = genomic DNA

SEQ ID NO: 62858 - DNA, 40 bp, Eggerthella lenta; identical to SEQ ID NO: 30003
  source 1..40: mol_type = genomic DNA

SEQ ID NO: 62859 - DNA, 50 bp, Eggerthella lenta; identical to SEQ ID NO: 62854
  source 1..50: mol_type = genomic DNA

SEQ ID NO: 62860 - DNA, 40 bp, Eggerthella lenta; identical to SEQ ID NO: 62855
  source 1..40: mol_type = genomic DNA

SEQ ID NO: 62861 - protein, 544 aa, Paenibacillus apii
MFTSNTAISEAVLYARVSSEDQQERETIETQIEYAEKYCDLHQINLTDTYKDDGVSGHAHALADRPEGKRLIEDAKAGKIKVVLIYNMKRLGRKARFTLDAIYQLEQYGVTIRSMTEPFDTSTPMGRFVITLLAGQAEFDRDTLIETLWHGANRHARLGKWLGGIVPYGYRVNQERFLEVNEDPLPGKEDLSEAGVVRLMYYLVANQKMSTIKVADYLNDLKIPPSYIVHGRRVKKGKRKENTAGVWNPGRVRNMIVNTTYKGLHIYGKRATRERELIERNVAAIVSEEVWELAQQVLRDNQIEAFRNQKRQYLLRGIIKCGICGLNYHGTSYSGPGRKPKAYYECNGKLYYNGPIKGRCPSKNVPGEWLENVVWEECVQFIQNPGDALQEISNGIEQRKSQLAELLQEKEIVLKSISDKEPERQSILSLYRQKMIKATDVEKQLQDILAETSALENRIKELDELIFAEGNLSHQFDSAELLLQELRSKIEGEPSYETKRMIVKTLVQEINVETIEPPGGGRKKANVNVLYSFSKSKGVPRTLV

SEQ ID NO: 62862 - DNA, 50 bp, Paenibacillus apii
  source 1..50: mol_type = genomic DNA
atccaaaggtgttccacgcacgcttgtccgtgaagagagtaccttgggca

SEQ ID NO: 62863 - DNA, 40 bp, Paenibacillus apii
  source 1..40: mol_type = genomic DNA
cgccgcttcgatgaatccgtgtcactgcggatttttaggg

SEQ ID NO: 62864 - DNA, 50 bp, Paenibacillus apii
  source 1..50: mol_type = genomic DNA
atccaaaggtgttccacgcacgcttttccgtgaagagagtaccttgggca

SEQ ID NO: 62865 - DNA, 40 bp, Paenibacillus apii
  source 1..40: mol_type = genomic DNA
tgccctttctttgagtccttttcacagcagttttttgggg

SEQ ID NO: 62866 - protein, 559 aa, Streptococcus pyogenes; identical to SEQ ID NO: 20396

SEQ ID NO: 62867 - DNA, 50 bp, Streptococcus pyogenes
  source 1..50: mol_type = genomic DNA
ctggaccttttgactcccgcagacccatcacgtggagacggtagcacttt

SEQ ID NO: 62868 - DNA, 40 bp, Streptococcus pyogenes; identical to SEQ ID NO: 52428
  source 1..40: mol_type = genomic DNA

SEQ ID NO: 62869 - DNA, 50 bp, Streptococcus pyogenes
  source 1..50: mol_type = genomic DNA
ctggaccttttgactcccgcagacgaatcacgtggagacggtagcacttt

SEQ ID NO: 62870 - DNA, 40 bp, Streptococcus pyogenes
  source 1..40: mol_type = genomic DNA
taaatttccctcctcagaagaatcacctggggtgcttatt

SEQ ID NO: 62871 - protein, 559 aa, Streptococcus pyogenes
MSKEKIKVYLYTRVSTSIQIEGYSLEAQKSRMKAFAIYNDYEIVGEYEDAGKSGRSIEGRIQFNRMMEDIKSGKDGVSFVLVFKLARFARNAADVLSTLQIMQDYGVNLICVDDGIDSSKDAGKLMISVLSAVAEIERENIRIQTMEGRIQKAREGKWNGGFAPYGYKLEDGKLFINEEEAVAIRTIFDQYVNTTIGANGISKYLENHGIRKIPRQNGKNPLFDAGLIRKILKNPVYNGKIAFGRRTLEKVHGTRNEYKQVEQDEYLISEGIHEAIVSDEVWQAAQVKLKSQAKKYEHVNKGKDTRTHLLSGIVKCPICGAGMFGNKCTKKKKDGTKYKDFYYYGCKHRQMIRGHKCTFRKQIREELLDDAVAEVIVKIVSNPKFASMMQEKINMKVDTSEIEKEIDNYQKELRKSHSTKFKLIEEIDNLDVEDKHYKRRKQDLDDRLYRMYDKIDELESSLIDAKAKKQTIEAEKLTGDNIYKVLIYFDKLYKVMNDVERRQLITALISEIQVYEEKQPNGQWLKSITFKLPIIDDDLNISLDNDEQVECVSLLEKRS

SEQ ID NO: 62872 - DNA, 50 bp, Streptococcus pyogenes; identical to SEQ ID NO: 62867
  source 1..50: mol_type = genomic DNA

SEQ ID NO: 62873 - DNA, 40 bp, Streptococcus pyogenes; identical to SEQ ID NO: 52428
  source 1..40: mol_type = genomic DNA

SEQ ID NO: 62874 - DNA, 50 bp, Streptococcus pyogenes; identical to SEQ ID NO: 62869
  source 1..50: mol_type = genomic DNA

SEQ ID NO: 62875 - DNA, 40 bp, Streptococcus pyogenes; identical to SEQ ID NO: 62870
  source 1..40: mol_type = genomic DNA

SEQ ID NO: 62876 - protein, 559 aa, Streptococcus pyogenes; identical to SEQ ID NO: 51456

SEQ ID NO: 62877 - DNA, 50 bp, Streptococcus pyogenes; identical to SEQ ID NO: 62867
  source 1..50: mol_type = genomic DNA

SEQ ID NO: 62878 - DNA, 40 bp, Streptococcus pyogenes; identical to SEQ ID NO: 52428
  source 1..40: mol_type = genomic DNA

SEQ ID NO: 62879 - DNA, 50 bp, Streptococcus pyogenes; identical to SEQ ID NO: 62869
  source 1..50: mol_type = genomic DNA

SEQ ID NO: 62880 - DNA, 40 bp, Streptococcus pyogenes; identical to SEQ ID NO: 62870
  source 1..40: mol_type = genomic DNA

SEQ ID NO: 62881 - protein, 559 aa, Streptococcus pyogenes
MSKEKIKVYLYTRVSTSIQIEGYSLEAQKSRMKAFAIYNDYEIVGEYEDAGKSGRSIEGRIQFNRMMEDIKSGKDGVSFVLVFKLARFARNAADVLSTLQIMQDYGVNLICVDDGIDSSKDAGKLMISVLSAVAEIERENIRIQTMEGRIQKAREGKWNGGFAPYGYKLEDGKLFINEEEAVAIRMIFDQYVNTTIGANGLSKYLENHGIRKIPRQNGKNPLFDAGLIRKILKNPVYNGKIAFGRRTLEKVHGTRNEYKQVEQDEYLISEGIHEAIVSNEVWQAAQVKLKSQAKKYEHVNKGKDTRTHLLSGIVKCPICGVGMFGNKCTKKKKDGTKYKDFYYYGCKHRQMIRGHKCTFRKQIREELLDDAVAEVIVKIVSNPKFASMMQEKINMKVDTSEIEKEIDNYQKELRKSHSTKFKLIEEIDNLDVEDKHYKRRKQDLDDRLYRMYDKIDELESSLIDAKAKKQTIEAEKLTGDNIYKILIYFDKLYKVMNDVERRQLITALISEIQVYEEKQPNGQWLKSITFKLPIIDDDLNISLDNDEQVECVSLLEKRS

SEQ ID NO: 62882 - DNA, 50 bp, Streptococcus pyogenes; identical to SEQ ID NO: 62867
  source 1..50: mol_type = genomic DNA

SEQ ID NO: 62883 - DNA, 40 bp, Streptococcus pyogenes; identical to SEQ ID NO: 52428
  source 1..40: mol_type = genomic DNA

SEQ ID NO: 62884 - DNA, 50 bp, Streptococcus pyogenes; identical to SEQ ID NO: 62869
  source 1..50: mol_type = genomic DNA

SEQ ID NO: 62885 - DNA, 40 bp, Streptococcus pyogenes; identical to SEQ ID NO: 62870
  source 1..40: mol_type = genomic DNA

SEQ ID NO: 62886 - protein, 559 aa, Streptococcus pyogenes; identical to SEQ ID NO: 51456

SEQ ID NO: 62887 - DNA, 50 bp, Streptococcus pyogenes
  source 1..50: mol_type = genomic DNA
ctggaccttttgactcccgcagacgcatcacgtggagacggtagcacttt

SEQ ID NO: 62888 - DNA, 40 bp, Streptococcus pyogenes; identical to SEQ ID NO: 54748
  source 1..40: mol_type = genomic DNA

SEQ ID NO: 62889 - DNA, 50 bp, Streptococcus pyogenes; identical to SEQ ID NO: 62869
  source 1..50: mol_type = genomic DNA

SEQ ID NO: 62890 - DNA, 40 bp, Streptococcus pyogenes; identical to SEQ ID NO: 62870
  source 1..40: mol_type = genomic DNA

SEQ ID NO: 62891 - protein, 559 aa, Streptococcus pyogenes; identical to SEQ ID NO: 20396

SEQ ID NO: 62892 - DNA, 50 bp, Streptococcus pyogenes
  source 1..50: mol_type = genomic DNA
ctggaccttttgactcccgcagacccatcatgtagagtgcatagcgttga

SEQ ID NO: 62893 - DNA, 40 bp, Streptococcus pyogenes; identical to SEQ ID NO: 52428
  source 1..40: mol_type = genomic DNA

SEQ ID NO: 62894 - DNA, 50 bp, Streptococcus pyogenes
  source 1..50: mol_type = genomic DNA
ctggaccttttgactcccgcagacgaatcatgtagagtgcatagcgttga

SEQ ID NO: 62895 - DNA, 40 bp, Streptococcus pyogenes; identical to SEQ ID NO: 62870
  source 1..40: mol_type = genomic DNA

SEQ ID NO: 62896 - protein, 559 aa, Streptococcus pyogenes
MSKEKIKVYLYTRVSTSIQIEGYSLEAQKSRMKAFAIYNDYEIVGEYEDAGKSGKSIEGRIQFNRMMEDIKSGKDGVSFVLVFKLSRFARNAADVLSTLQIMQDYGVNLICVEDGIDSSKDAGKLMISVLSAVAEIERENIRIQTMEGRIQKAREGKWNGGFAPYGYKLEDGKLFINEEEAVAIRTIFDQYVNTTIGANGLSKYLENHGIRKIPRQNGKNPLFDAGLIRKILKNPVYNGKIAFGRRTLEKVHGTRNEYKQVEQDEYLISEGIHEAIVSDEVWQAAQVKLKSQAKKYEHVNKGKDTRTHLLSGIVKCPICGVGMFGNKCTKKKKDGTKYKDFYYYGCKHRQMIRGHKCTFRKQIREELLDDAVAEVIVKIVSNPKFASMMQEKINMKVDTSEIEKEIDNYQKELRKSHSTKFKLIEEIDNLDVEDKHYKRRKQDLDDRLYRMYDKIDELESSLIDAKAKKQTIEAEKLTGDNIYKVLIYFDKLYKVMNDVERRQLITALISEIQIYEEKQPNGQWLKSITFKLPIIDDDLNISLDNDEHVECVSLLEKRS

SEQ ID NO: 62897 - DNA, 50 bp, Streptococcus pyogenes; identical to SEQ ID NO: 62867
  source 1..50: mol_type = genomic DNA

SEQ ID NO: 62898 - DNA, 40 bp, Streptococcus pyogenes; identical to SEQ ID NO: 52428
  source 1..40: mol_type = genomic DNA

SEQ ID NO: 62899 - DNA, 50 bp, Streptococcus pyogenes; identical to SEQ ID NO: 62869
  source 1..50: mol_type = genomic DNA

SEQ ID NO: 62900 - DNA, 40 bp, Streptococcus pyogenes; identical to SEQ ID NO: 62870
  source 1..40: mol_type = genomic DNA

SEQ ID NO: 62901 - protein, 559 aa, Streptococcus pyogenes; identical to SEQ ID NO: 20396

SEQ ID NO: 62902 - DNA, 50 bp, Streptococcus pyogenes
  source 1..50: mol_type = genomic DNA
ctggacctttcgactcccgcagacccatcacgtggagacggtagcacttt

SEQ ID NO: 62903 - DNA, 40 bp, Streptococcus pyogenes; identical to SEQ ID NO: 52428
  source 1..40: mol_type = genomic DNA

SEQ ID NO: 62904 - DNA, 50 bp, Streptococcus pyogenes
  source 1..50: mol_type = genomic DNA
ctggacctttcgactcccgcagacgaatcacgtggagacggtagcacttt

SEQ ID NO: 62905 - DNA, 40 bp, Streptococcus pyogenes; identical to SEQ ID NO: 62870
  source 1..40: mol_type = genomic DNA

SEQ ID NO: 62906 - protein, 603 aa, Streptococcus pyogenes
MKIFLTWQKHRLRKRNKNAIIYLRYKSKLFRNYKDIEKYIEVNAMSKEKIKVYLYTRVSTSIQIDGYSLEAQKSRMKAFALYNDYEIVGEYEDAGKSGKSIEGRIQFTRMMEDIKSGKDGVSFVLVFKLSRFARNAADVLSTLQTMQDFGVNLICVEDGIDSSKDAGKLMISVLSAVAEIERENIRVQTMEGRIQKAREGKWNGGFAPYGYQLIDGKLIINEEEAVAIRTIFDQYVNTTIGANGLSKYLENHGIRKIPRQNGKNPLFDAGLIRKILKNPVYNGKIAFGRRTLEKVHGTRNEYKQVEQDEYLIAEGIHEAIISDELWQAAQVKLKSQAKKYEHVNKGKDTRTHLLSGIVKCPICGVGMFGNKCIKKKKDGTKYKDFYYYGCKHRHMIRGHKCTYNKQIREELLDDAVAEVIIKIVSNPKFASMMQEKINMKVDTSEIEKEIDNYQKELRKSHSTKFKLIEEIDNLDADDKHYKRRKQDLDDRLYRMYDKIENLESLLIDAKAKKQTIEAEKLTGDNIYKILIYFDKLYKVMNDVERRQLITALISEIQIYEEKQPNGQWLKSITFKLPIIDEDFNIGLDNDEQVECVSLLEKRS

SEQ ID NO: 62907 - DNA, 50 bp, Streptococcus pyogenes
  source 1..50: mol_type = genomic DNA
ctggaccttttgactcccgcagacgcatcacgtggagacggtagcattat

SEQ ID NO: 62908 - DNA, 40 bp, Streptococcus pyogenes; identical to SEQ ID NO: 52428
  source 1..40: mol_type = genomic DNA

SEQ ID NO: 62909 - DNA, 50 bp, Streptococcus pyogenes
  source 1..50: mol_type = genomic DNA
ctggaccttttgactcccgcagacgaatcacgtggagacggtagcattat

SEQ ID NO: 62910 - DNA, 40 bp, Streptococcus pyogenes; identical to SEQ ID NO: 62870
  source 1..40: mol_type = genomic DNA

SEQ ID NO: 62911 - protein, 559 aa, Streptococcus pyogenes; identical to SEQ ID NO: 51506

SEQ ID NO: 62912 - DNA, 50 bp, Streptococcus pyogenes; identical to SEQ ID NO: 62867
  source 1..50: mol_type = genomic DNA

SEQ ID NO: 62913 - DNA, 40 bp, Streptococcus pyogenes; identical to SEQ ID NO: 52428
  source 1..40: mol_type = genomic DNA

SEQ ID NO: 62914 - DNA, 50 bp, Streptococcus pyogenes; identical to SEQ ID NO: 62869
  source 1..50: mol_type = genomic DNA

SEQ ID NO: 62915 - DNA, 40 bp, Streptococcus pyogenes; identical to SEQ ID NO: 62870
  source 1..40: mol_type = genomic DNA

SEQ ID NO: 62916 - protein, 559 aa, Streptococcus pyogenes; identical to SEQ ID NO: 51446

SEQ ID NO: 62917 - DNA, 50 bp, Streptococcus pyogenes; identical to SEQ ID NO: 62867
  source 1..50: mol_type = genomic DNA

SEQ ID NO: 62918 - DNA, 40 bp, Streptococcus pyogenes; identical to SEQ ID NO: 52428
  source 1..40: mol_type = genomic DNA

SEQ ID NO: 62919 - DNA, 50 bp, Streptococcus pyogenes; identical to SEQ ID NO: 62869
  source 1..50: mol_type = genomic DNA

SEQ ID NO: 62920 - DNA, 40 bp, Streptococcus pyogenes; identical to SEQ ID NO: 62870
  source 1..40: mol_type = genomic DNA

SEQ ID NO: 62921 - protein, 594 aa, Streptococcus pyogenes; identical to SEQ ID NO: 51526

SEQ ID NO: 62922 - DNA, 50 bp, Streptococcus pyogenes; identical to SEQ ID NO: 62892
  source 1..50: mol_type = genomic DNA

SEQ ID NO: 62923 - DNA, 40 bp, Streptococcus pyogenes; identical to SEQ ID NO: 52428
  source 1..40: mol_type = genomic DNA

SEQ ID NO: 62924 - DNA, 50 bp, Streptococcus pyogenes; identical to SEQ ID NO: 62894
  source 1..50: mol_type = genomic DNA

SEQ ID NO: 62925 - DNA, 40 bp, Streptococcus pyogenes; identical to SEQ ID NO: 62870
  source 1..40: mol_type = genomic DNA

SEQ ID NO: 62926 - protein, 594 aa, Streptococcus pyogenes; identical to SEQ ID NO: 62571

SEQ ID NO: 62927 - DNA, 50 bp, Streptococcus pyogenes
  source 1..50: mol_type = genomic DNA
ctggaccttttgactcccgcagacccatcacgtcgagtgcatagcgttga

SEQ ID NO: 62928 - DNA, 40 bp, Streptococcus pyogenes; identical to SEQ ID NO: 54748
  source 1..40: mol_type = genomic DNA

SEQ ID NO: 62929 - DNA, 50 bp, Streptococcus pyogenes
  source 1..50: mol_type = genomic DNA
ctggaccttttgactcccgcagacgaatcacgtcgagtgcatagcgttga

SEQ ID NO: 62930 - DNA, 40 bp, Streptococcus pyogenes; identical to SEQ ID NO: 62870
  source 1..40: mol_type = genomic DNA

SEQ ID NO: 62931 - protein, 559 aa, Streptococcus pyogenes
MSKEKIKVYLYTRVSTSIQIDGYSLEAQKTRMKAFALYNDYEIVGEYEDAGKSGKSIEGRVQFTRMMEDIKSGKDGVSFVLVFKLSRFARNAADVLSTLQTMQDFGVNLICVEDGIDSSKDAGKLMISVLSAVAEIERENIRVQTMEGRIQKAREGKWNGGFAPYGYQLVDGKLFINEEEAVAIRTIFEQYVNTTIGANGLSKYLENHGIRKIPRQNGKNPLFDAGLIRKILKNPVYKGKIAFGRRTLEKVHGTRNEYKQVEQDEYLIAEGIHEAIISDELWQAAQVKLKSQAKKYEHVNKGKDVRTHLLSGIVKCPICGVGMFGNKCIKKKKDGTKYKDFYYYGCKHRQMIRGHKCTFSKQIREELLDDAVAELIIKIVSNPKFASIMQEKINMKVDTSEIEKEIDNYQKELRKSHSIKFKLIEEIDNLNVDDKHYKRRKQDLDDRLYRMYDKIEELESLLIDAKAKKQAIEAEKLTGDNIYKVLIYFDKLYNVMNDVERRQLITALISEIQIYEEKQPNGQWLKSITFKLPIIDEDLNISLDNDKQVECVSLLEKRS

SEQ ID NO: 62932 - DNA, 50 bp, Streptococcus pyogenes
  source 1..50: mol_type = genomic DNA
ctggaccttttgactcccgcagacccatcacgtggagacggtagcattat

SEQ ID NO: 62933 - DNA, 40 bp, Streptococcus pyogenes; identical to SEQ ID NO: 54748
  source 1..40: mol_type = genomic DNA

SEQ ID NO: 62934 - DNA, 50 bp, Streptococcus pyogenes; identical to SEQ ID NO: 62909
  source 1..50: mol_type = genomic DNA

SEQ ID NO: 62935 - DNA, 40 bp, Streptococcus pyogenes; identical to SEQ ID NO: 62870
  source 1..40: mol_type = genomic DNA

SEQ ID NO: 62936 - protein, 559 aa, Streptococcus pyogenes
MSKEKIKVYLYTRVSTSIQIEGYSLEAQKSRMKAFAIYNDYEIVGEYEDAGKSGRSIEGRIQFNRMMEDIKSGKDGVSFVLVFKLARFARNAADVLSTLQIMQDYGVNLICVDDGIDSSKDAGKLMISVLSAVAEIERDNIRIQTMEGRIQKAREGKWNGGFAPYGYKLEDGKLFINEEEAVAIRTIFDQYVNTTIGANGLSKYLENHGIRKIPRQNGKNPLFDAGLIRKILKNPVYNGKIAFGRRTLEKVHGTRNEYKQVEQDEYIISEGIHEAIVSDEVWQAAQVKLKSQAKKYEHVNKGKDTRTHLLSGIVKCPICGVGMFGNKCTKKKKDGTKYKDFYYYGCKHRQMIRGHKCTFRKQIREELLDDAVAEVIVKIVSNPKFASMMQEKINMKVDTSEIEKEIDNYQKELRKSHSTKFKLIEEIDNLDVEDKHYKRRKQDLDDRLYRMYDKIDELESSLIDAKAKKQTIEAEKLTGDNIYKVLIYFDKLYKVMNDVERRQLITALISEIQVYEEKQPNGQWLKSITFKLPIIDDDLNISLDNNEQVECVSLLEKRS

SEQ ID NO: 62937 - DNA, 50 bp, Streptococcus pyogenes; identical to SEQ ID NO: 62887
  source 1..50: mol_type = genomic DNA

SEQ ID NO: 62938 - DNA, 40 bp, Streptococcus pyogenes; identical to SEQ ID NO: 52428
  source 1..40: mol_type = genomic DNA

SEQ ID NO: 62939 - DNA, 50 bp, Streptococcus pyogenes; identical to SEQ ID NO: 62869
  source 1..50: mol_type = genomic DNA

SEQ ID NO: 62940 - DNA, 40 bp, Streptococcus pyogenes; identical to SEQ ID NO: 62870
  source 1..40: mol_type = genomic DNA

SEQ ID NO: 62941 - protein, 458 aa, Mycobacteroides abscessus
MIYTRVSDDDSGRSRSTADQEKDCREHCAKQGWTVKAVLCDEGVGASRYSRGEREAFKQLETILQRGNVLVFWEASRSQRDLAAYVKLRDLSARIGAYWCYSGKLFDLTRGDDRFVTGLDALLSEREVDQFRERVERGRRSAAALGKPGAGPAPWGYKPLRDDRTGDLINWVPDPEEARLVRDAARSVLAGESTRSVLKRINAGGVLHRRRPQSLTALRRALMNPQLVGLRKYQGEIVGEGTWEPILTREDHEKLVATLTAPSRKTHHGTEPKWLLTGIAVCGVCGASMATKDNKSSRIYICRANRGCVGRNVEYADEVVKEAALYVLERLDPAIFGEDDGSTREVLAELAESESLLEEYRALADAREISPQSFARFEQKLLSQIESARSRLSASQRMSAALAIAGPDARRFWASMEANGTQGLLDRRAIVRCFRVTIKPVGRGQKLIPESIGVELLG

SEQ ID NO: 62942 - DNA, 50 bp, Mycobacteroides abscessus
  source 1..50: mol_type = genomic DNA
aatcacccctatcaaactatctggggccggaacgttcggaaggggtgata

SEQ ID NO: 62943 - DNA, 40 bp, Mycobacteroides abscessus
  source 1..40: mol_type = genomic DNA
catcaacgtcacgtgctggggccgactggttaccggcgtc

SEQ ID NO: 62944 - DNA, 50 bp, Mycobacteroides abscessus
  source 1..50: mol_type = genomic DNA
aatcacccctatcaaactatctggaaccggaacgttcggaaggggtgata

SEQ ID NO: 62945 - DNA, 40 bp, Mycobacteroides abscessus
  source 1..40: mol_type = genomic DNA
cctgaacctcacgtgcgggaacctgctgtgcaccgtggtc

SEQ ID NO: 62946 - protein, 458 aa, Mycobacteroides abscessus
MIYTRVSDDDSGRSRSTADQEKDCREHCAKQGWTVKAVLCDEGVGASRYSRGEREAFKQLETILQRGNVLVFWEASRSQRDLAAYVKLRDLSARIGAYWCYSGKLFDLTRGDDRFVTGLDALLSEREVDQFRERVERGRRSAAALGKPGAGPAPWGYKPLRDDRTGDLINWVPDPEEARLVRDAARSVLAGESTRSVLKRINAGGVLHRRRPQSLTALRRALMNPQLVGLRKYQGEIVGEGTWEPILTREDHEKLVATLTAPSRKTHHGTEPKWLLTGIAVCGVCGASMATKGNKSSRIYICRANRGCVGRNVEYADEVVKEAALYVLERLDPAIFGKDDGSASEVLAELAESEALLEEYRELADAREISPQSFARFEQKLLAQIESARSRLSVSQRMSAALAIAGPDARRLWASMEANGTQGLLDRRAIVRCFRVTIKPVGRGRKLIPESIGVELLG

SEQ ID NO: 62947 - DNA, 50 bp, Mycobacteroides abscessus; identical to SEQ ID NO: 62942
  source 1..50: mol_type = genomic DNA

SEQ ID NO: 62948 - DNA, 40 bp, Mycobacteroides abscessus
  source 1..40: mol_type = genomic DNA
catcaacgtcacgtgctggggccgactggtaaccggcgtc

SEQ ID NO: 62949 - DNA, 50 bp, Mycobacteroides abscessus; identical to SEQ ID NO: 62944
  source 1..50: mol_type = genomic DNA

SEQ ID NO: 62950 - DNA, 40 bp, Mycobacteroides abscessus; identical to SEQ ID NO: 62945
  source 1..40: mol_type = genomic DNA

SEQ ID NO: 62951 - protein, 458 aa, Mycobacteroides abscessus
MIYTRVSDDDSGRSRSTADQEKDCREHCAKQGWTVKAVLCDEGVGASRYSRGEREAFKQLETILQRGNVLVFWEASRSQRDLAAYVKLRDLSARIGAYWCYSGKLFDLTRGDDRFVTGLDALLSEREVDQFRERVERGRRSAAALGKPGAGPAPWGYKPLRDDRTGDLINWVPDPEEARLVRDAARSVLAGESTRSVLKRINAGGVLHRRRPQSLTALRRALMNPQLVGLRKYQGEIVGEGTWEPILTREDHEKLVATLTAPSRKTHHGTEPKWLLTGIAVCGVCGASMATKGNKSSRIYICRANRGCVGRNVEYADEVVKEAALYVLERLDPAIFGEDDGSASEVLAELAESESLLEEYRALADAREISPQSFARFEQKLLTQIESARSRLSVSQRMSAALAIAGPDARRFWASMEANGTQGLLDRRAIVRCFRVTIKPVGRGRKLIPESIGVELLS

SEQ ID NO: 62952 - DNA, 50 bp, Mycobacteroides abscessus; identical to SEQ ID NO: 62942
  source 1..50: mol_type = genomic DNA

SEQ ID NO: 62953 - DNA, 40 bp, Mycobacteroides abscessus; identical to SEQ ID NO: 62948
  source 1..40: mol_type = genomic DNA

SEQ ID NO: 62954 - DNA, 50 bp, Mycobacteroides abscessus; identical to SEQ ID NO: 62944
  source 1..50: mol_type = genomic DNA

SEQ ID NO: 62955 - DNA, 40 bp, Mycobacteroides abscessus; identical to SEQ ID NO: 62945
  source 1..40: mol_type = genomic DNA

SEQ ID NO: 62956 - protein, 458 aa, Mycobacteroides abscessus
MIYTRVSDDDSGRSRSTADQEKDCREHCAKQGWTVKAVLCDEGVGASRYSRGEREAFKQLETILQRGNVLVFWEASRSQRDLAAYVKLRDLSARIGAYWCYSGKLFDLTRGDDRFVTGLDALLSEREVDQFRERVERGRRSAAALGKPGAGPAPWGYKPLRDDRTGDLINWVPDPEEARLVRDAARSVLAGESTRSVLKRINAGGVLHRRRPQSLTALRRALMNPQLVGLRKYQGEIVGEGTWEPILTREDHEKLVATLTAPSRKTHHGTEPKWLLTGIAVCGVCGASMATKGNKSSRIYICRANRGCVGRNVEYADEVVKEAALYVLERLDPAIFGKDDGSASEVLAELAESEALLEEYRELADAREISPQSFARFEQKLLAQIESARSRLSVSQRMSAALAIAGPDARRFWASMEANGTQGLLDRRAIVRCFRVTIKPVGRGRKLIPESIGVELLS

SEQ ID NO: 62957 - DNA, 50 bp, Mycobacteroides abscessus; identical to SEQ ID NO: 62942
  source 1..50: mol_type = genomic DNA

SEQ ID NO: 62958 - DNA, 40 bp, Mycobacteroides abscessus; identical to SEQ ID NO: 62948
  source 1..40: mol_type = genomic DNA

SEQ ID NO: 62959 - DNA, 50 bp, Mycobacteroides abscessus; identical to SEQ ID NO: 62944
  source 1..50: mol_type = genomic DNA

SEQ ID NO: 62960 - DNA, 40 bp, Mycobacteroides abscessus; identical to SEQ ID NO: 62945
  source 1..40: mol_type = genomic DNA

SEQ ID NO: 62961 - protein, 487 aa, Adlercreutzia equolifaciens
MEYSLCKKPRPGRRAASYARFSSHNQRSESIEIQHDNNLAYCAIEDLDVVAIYSDEARSGRNTNRADFQRMVADAKAGLFDYVVIYKVARIMRNRDEMALLRITLRKHGVEVLYSGESIGTGSDAILQLGLKEVLAEWESAQLAERIVDGIQKNAERCMANGQQLYGWDIVEGYYEINEAEAGVLRRAKGMLFNGKTVAEIVRALEGHTTKRGKPITHNALTKMLKRKQNAGVFSYAGHEKEGGMPALWSMEEQRMIWKMLGDETRPRRKAGNADFLLTGKLWCGKCDTPMTGTSGTGKSGKVYYYYQDKKGCGRKVRKEAIEENVAEAVRAALSVEANREKIADLMCEFEDERDDTPQSAIIEGELKEITLAYDRIWKAIEQGIAPPGGKERVDELKAREELLQEELATAKAIEAVKLDRDRVLFMLESMAEIDDPKALIDVFVSKVVLTGDDDLHIFHYFDDNGGALSPGDDGGGGVLPNVNMLH

SEQ ID NO: 62962 - DNA, 50 bp, Adlercreutzia equolifaciens
  source 1..50: mol_type = genomic DNA
tgttctcccaaatgtgaacatgctccaccatagtgatattagccgaacac

SEQ ID NO: 62963 - DNA, 40 bp, Adlercreutzia equolifaciens
  source 1..40: mol_type = genomic DNA
ggttcgatccccctacgctccaccaatcacctaacgaccg

SEQ ID NO: 62964 - DNA, 50 bp, Adlercreutzia equolifaciens
  source 1..50: mol_type = genomic DNA
tgttctcccaaatgtgaacatgctaaaccatagtgatattagccgaacac

SEQ ID NO: 62965 - DNA, 40 bp, Adlercreutzia equolifaciens
  source 1..40: mol_type = genomic DNA
ggttggggacccctgccctaacccaatgacccaatgactg

SEQ ID NO: 62966 - protein, 521 aa, Eubacterium callanderi
MARRKTTLNDNNLAIAYYRYSSHSQNEASIDQQRELAHEWADAHGLKIVREYEDAAISGTKEDRPGFQLMLSEVAKIRPNTLIAWKTDRLGRDKYVLAMAKKTIRDAGCEIHLLAENIPTDTAEGILIEGLMEALAEYYSRNLSVHIQRGMDFNAEHANFNGHKVFGFKTEKVDKKRKYVIDPDTAPFVQLMFTKYAEGEPMQSICDEFNEAGLRTSRGNPFGVKTMHRMLKNRAYIGEYRHGEFVVPGGMPALVDGETFDRAQKRLAENKRKGSQRARGMDEDGAPRYWLTGKLYCGECGETMQGVSGTSKTGRTYYYYYCSAQRKKLCTKKKVKKDWIEDLVTDVLRYIIDDSENLMSLAVDAAVYYKEHYKETGYLEGLEAKRKEVEKGIANLMKAIEGGALSDTLIERLNQLEAQKASLNDAIQAENVKVSLCEDEHSIKAYFEKFLHADFDNPETRDKILEYFVDKIYLYDEKLVVTSWYSEDKTEITWDMLKGADGDPFVKGEAAEFDCFPLGST

SEQ ID NO: 62967 - DNA, 50 bp, Eubacterium callanderi; identical to SEQ ID NO: 37162
  source 1..50: mol_type = genomic DNA

SEQ ID NO: 62968 - DNA, 40 bp, Eubacterium callanderi
  source 1..40: mol_type = genomic DNA
ggttcgactcccaccgtctccaccattcatggaaccgcca

SEQ ID NO: 62969 - DNA, 50 bp, Eubacterium callanderi
  source 1..50: mol_type = genomic DNA
agttcgactgcttccccttaggctggaccaaaagaggaagcgtcgaactc

SEQ ID NO: 62970 - DNA, 40 bp, Eubacterium callanderi
  source 1..40: mol_type = genomic DNA
gaaccgccgccccccgactggaccctgcctggaaccgccg

SEQ ID NO: 62971 - protein, 471 aa, Vibrio cyclitrophicus
MTTVLYYTRFSSSKQRDGSSIERQLRLCDSYRLTHKLPSPNHTYTDKGTSAYHSKQLEGELGQLLHDLKNSVYQKPITILCEAIDRISRASIRDSQTIINSITEHADLVTVSDGKVYTHSDDSLETSLIQLVKSATSREESDKKSKRAKEYWATCKENGIAQNSVCPKYLKLNADKKGYTVKDDIADEIRGIYKLLKAGQGIKKAHQSFPSWSPSSIARLRKDERIVEHGIISDTDFWKVQSTLKTTRKSGAKNSKNLFRSLFECGECGSNLVYVAPRPSRPTWSGHLMCKNRQAKGRAACPNSKNINYNKFEPIFLDFLESVSSELFKSNLAEVEAKKSQLEALVMQHEQLETKVDNLYDALGESPTHRGKAKIDQVEAQLSKLESIKEKLEAEVQGYTDIQLEQPSTDLEREEFNTQLLHAFKSITVKYPTEDNLWFTFDDKFEISSDFTRWELIHIDTNEQPIVLEFE

SEQ ID NO: 62972 - DNA, 50 bp, Vibrio cyclitrophicus
  source 1..50: mol_type = genomic DNA
acgcacaattgattacccaatggcaagcctgctgataacctattgagcaa

SEQ ID NO: 62973 - DNA, 40 bp, Vibrio cyclitrophicus
  source 1..40: mol_type = genomic DNA
tcctggaatgcccaatggcaagcctgcgggcgtgcgatgc

SEQ ID NO: 62974 - DNA, 50 bp, Vibrio cyclitrophicus
  source 1..50: mol_type = genomic DNA
acgcacaattgattacccaatggctggcctgctgataacctattgagcaa

SEQ ID NO: 62975 - DNA, 40 bp, Vibrio cyclitrophicus
  source 1..40: mol_type = genomic DNA
tcctggaagggcccctccctggtctgccggtgtgctctgc

SEQ ID NO: 62976 - protein, 591 aa, Bradyrhizobium brasilense
MTPRAYSYLRMSTDDQLKGDSRRRQLEASRAYAEQNGLELADNAQLEDIGISAFKGANARDGALGQFLAAVKAGSVERGSYLLVESLDRLSREEILPAHTLFLSIVQAGINLVTLADNRVYRAKTTNLVDMITSLVIMERAHEESKTKSLRVGAAWKNKRKMAAEGRPMTARCPAWLRLSTDRQSYELIPERVEIVRQIFSDSAAGLGMYSITTRLNRAGVAAFEGKNGWHRSYLAKTLENRAVLGQFQPHVKVDGKRVPEGDPIEGYYPAIISDELFYQAQHLRSQRKRGGAGRKGPGYTNLFTGLARCAYCHSTVAYENKGSGTRGGTYLVCGNAQRGRGCSATRWRYQDFEASFLAFVQELDLESILNATEDAETRKRLEGEISALRGELSSVSDLMEKTYAVLSAGGSPEFVAAKLNELTARQAVLRERLASRESEQLAFNGRDLRFYTSREEIKELVKRLQMPPSDELYKLRAQIASRLKILVETLLIAPQGALPAMQRSIEELQKIIGEEHDDVVAHMQRLAAHPDQSRRYFAVGFRDAAVRAVFPAYDDPLRFDQQIVAGQGSSDHGERSIEVVEPPDRRTRIA

SEQ ID NO: 62977 - DNA, 50 bp, Bradyrhizobium brasilense
  source 1..50: mol_type = genomic DNA
gcccggctaattgtctataacatcaggaaaatatgtacaataaaccgtgc

SEQ ID NO: 62978 - DNA, 40 bp, Bradyrhizobium brasilense
  source 1..40: mol_type = genomic DNA
gccgggcgagccgatcatcagaagatgatgaccgccggcg

SEQ ID NO: 62979 - DNA, 50 bp, Bradyrhizobium brasilense
  source 1..50: mol_type = genomic DNA
gcccggctaattgtctataacatcgggaaaatatgtacaataaaccgtgc

SEQ ID NO: 62980 - DNA, 40 bp, Bradyrhizobium brasilense
  source 1..40: mol_type = genomic DNA
gcccggggcgctgctctaaggaagatgctgaccgcagtcg

SEQ ID NO: 62981 - protein, 589 aa, Klebsiella oxytoca; identical to SEQ ID NO: 62436

SEQ ID NO: 62982 - DNA, 50 bp, Klebsiella oxytoca; identical to SEQ ID NO: 45382
  source 1..50: mol_type = genomic DNA

SEQ ID NO: 62983 - DNA, 40 bp, Klebsiella oxytoca; identical to SEQ ID NO: 52678
  source 1..40: mol_type = genomic DNA

SEQ ID NO: 62984 - DNA, 50 bp, Klebsiella oxytoca
  source 1..50: mol_type = genomic DNA
gattatacctattacacttcagtggatactaaggtaaactacatcccatt

SEQ ID NO: 62985 - DNA, 40 bp, Klebsiella oxytoca
  source 1..40: mol_type = genomic DNA
tgtgggccagactgtcgacgacccctacgccacctttgtc

SEQ ID NO: 62986 - protein, 589 aa, Klebsiella oxytoca; identical to SEQ ID NO: 62361

SEQ ID NO: 62987 - DNA, 50 bp, Klebsiella oxytoca; identical to SEQ ID NO: 45382
  source 1..50: mol_type = genomic DNA

SEQ ID NO: 62988 - DNA, 40 bp, Klebsiella oxytoca; identical to SEQ ID NO: 52678
  source 1..40: mol_type = genomic DNA

SEQ ID NO: 62989 - DNA, 50 bp, Klebsiella oxytoca; identical to SEQ ID NO: 62984
  source 1..50: mol_type = genomic DNA

SEQ ID NO: 62990 - DNA, 40 bp, Klebsiella oxytoca; identical to SEQ ID NO: 62985
  source 1..40: mol_type = genomic DNA

SEQ ID NO: 62991 - protein, 589 aa, Klebsiella oxytoca; identical to SEQ ID NO: 47751

SEQ ID NO: 62992 - DNA, 50 bp, Klebsiella oxytoca; identical to SEQ ID NO: 45382
  source 1..50: mol_type = genomic DNA

SEQ ID NO: 62993 - DNA, 40 bp, Klebsiella oxytoca; identical to SEQ ID NO: 52678
  source 1..40: mol_type = genomic DNA

SEQ ID NO: 62994 - DNA, 50 bp, Klebsiella oxytoca; identical to SEQ ID NO: 62984
  source 1..50: mol_type = genomic DNA

SEQ ID NO: 62995 - DNA, 40 bp, Klebsiella oxytoca; identical to SEQ ID NO: 62985
  source 1..40: mol_type = genomic DNA

SEQ ID NO: 62996 - protein, 589 aa, Klebsiella oxytoca; identical to SEQ ID NO: 50026

SEQ ID NO: 62997 - DNA, 50 bp, Klebsiella oxytoca; identical to SEQ ID NO: 45382
  source 1..50: mol_type = genomic DNA

SEQ ID NO: 62998 - DNA, 40 bp, Klebsiella oxytoca; identical to SEQ ID NO: 52678
  source 1..40: mol_type = genomic DNA

SEQ ID NO: 62999 - DNA, 50 bp, Klebsiella oxytoca; identical to SEQ ID NO: 62984
  source 1..50: mol_type = genomic DNA

SEQ ID NO: 63000 - DNA, 40 bp, Klebsiella oxytoca; identical to SEQ ID NO: 62985
  source 1..40: mol_type = genomic DNA

SEQ ID NO: 63001 - protein, 496 aa, Caldanaerobacter subterraneus
MADTELRAAAYARYSSDNQREESIEAQLRAIKEYCEKNNIQLVKIYTDEAKSATTDDRPAFLQMIKDSSLGLFNAVIVHKLDRFARNRYDSAFYRRQLKKNGVKLISVLEQLDDSPESIILESVLEGMAEYYSKNLAREVMKGLKENAFQAKFNGGIPPLGYDIVDGKYVINEKEAEAVRLIFELYAQGYGYRQIIDELNLRGYRTKKGNPFSKNSIHEILKNEKYTGKYIFNKGTKKNHRMVKEDVIVIENAIPAIIDEDLFKKVQEKMKERKITRGANSAKRVYLLSGLVYCGVCGSKMVGCLSRGKYVTYRCSRKDRTKQCTNRDINKEKVEAFVIDELNKRILDPKVAPILARLLNEENQKLNREKAEEIAFLKKRYKEVEEQMKNIVEAIAQGMFQPIMKEKMNELEAMRNELAYRIKELENKKETSFITPEMILKIFEKDREIINSSKDPHEIKEVLKNYIKKIIVTPDEIKCEFYFWIGDDFRSLLVAA

SEQ ID NO: 63002 - DNA, 50 bp, Caldanaerobacter subterraneus
  source 1..50: mol_type = genomic DNA
tttccgttctttgctggtagcggcgaatcgctcccaactttgaacgtact

SEQ ID NO: 63003 - DNA, 40 bp, Caldanaerobacter subterraneus
  source 1..40: mol_type = genomic DNA
gcgcatggatggtagcggcgagtggattcgaaccaccgac

SEQ ID NO: 63004 - DNA, 50 bp, Caldanaerobacter subterraneus
  source 1..50: mol_type = genomic DNA
tttccgttctttgctggtagcggcagatcgctcccaactttgaacgtact

SEQ ID NO: 63005 - DNA, 40 bp, Caldanaerobacter subterraneus
  source 1..40: mol_type = genomic DNA
ccacatggatggttctggaaggtggagtagtacaactgac

SEQ ID NO: 63006 - protein, 531 aa, Mycobacterium avium
MARVLGRVRLSRLTDESTSAERQRELIEQWSAMNDHTVVGWAEDLDISGSIDPFDTPQLGDWLNNRAPEFDLIACWKLDRLSRNTININGLFAWCIEYSKTVVSVTESIDLGTPVGRLIANVLAFLAEGELEAIRERTKAGRQKVVSLGRWPGGPAPYGFTVVKLDGGGFKLKPRADQVAVIKRIRDLILSGLSMEAVAKRLNDNGVPSPTGKAWRSARLFLIMESKLLLGHSTYKGQTVRDAQGMPVMVSEPILEPDEWDRLQAAIQARRLPSAAKRTQNTSPLYGVIFCKSCGSMMYNRKYGHRESDRGYKYDYYMCPKSCGRMIHAELVYRMLDKIFTAEVGDEMVRERVYVPAESHETEMKEAQRAVDEITPLLGVITSETMRKQLTSQLLALDSRIKTLESMPVRESHWEYRETGGTYAQAWESSDLAGRRDLLVKSGITASAFKPKTGAEIEFELVIPPDIREQMGLGPRQSTRVTMADLFAEMKESGVAGIEISGGEITYTHRTGATYMERIEVPVTGTHTEPR

SEQ ID NO: 63007 - DNA, 50 bp, Mycobacterium avium
  source 1..50: mol_type = genomic DNA
gttctacaaaccccctttaacgatccgtcgccaggttggttgtgtagaat

SEQ ID NO: 63008 - DNA, 40 bp, Mycobacterium avium; identical to SEQ ID NO: 57968
  source 1..40: mol_type = genomic DNA

SEQ ID NO: 63009 - DNA, 50 bp, Mycobacterium avium
  source 1..50: mol_type = genomic DNA
gttctacaaaccccctttaacgatctgtcgccaggttggttgtgtagaat

SEQ ID NO: 63010 - DNA, 40 bp, Mycobacterium avium
  source 1..40: mol_type = genomic DNA
gcagacatcctttaaccatctttcctcttataccaagaag

SEQ ID NO: 63011 - protein, 540 aa, Pseudomonas carnis; identical to SEQ ID NO: 60026

SEQ ID NO: 63012 - DNA, 50 bp, Pseudomonas carnis; identical to SEQ ID NO: 60027
  source 1..50: mol_type = genomic DNA

SEQ ID NO: 63013 - DNA, 40 bp, Pseudomonas carnis
  source 1..40: mol_type = genomic DNA
cccgggcaatgccgtgctgatcaaatcggcctatccctgg

SEQ ID NO: 63014 - DNA, 50 bp, Pseudomonas carnis
  source 1..50: mol_type = genomic DNA
cacaggtaaatcatggacgtgttgcacaagtcaggcgtataatacccgta

SEQ ID NO: 63015 - DNA, 40 bp, Pseudomonas carnis
  source 1..40: mol_type = genomic DNA
tcttggggatgcagtgatgcacaaaacagcctattcctgc

SEQ ID NO: 63016 - protein, 540 aa, Pseudomonas carnis
MSTSEQLRGFSLERQRKLIADFAAKNDLSLENSHVLEDIGHSAFSDDTQQKELTKFFEDLEKGKFQAGDVFALENIDRLTRRGPIDALMKVNAIISKGLKLAIISDKEQKILEEIDVYTIITLSIDATRANVESKNKSDKGLENWALKRELAASQGVAMTAQAPAWLDTQTFEVFDEEKRKDIKRRRYVLNPEKAETVKLIFELFQNGNGSLKIKNILNERKIPTFKNVEYWEPSIISKILRNPATFGLYQPKKQNTGKRDLIAACEPIEDYFPAIISRETFEQCQRIAATNTTRKGRKGKVFTNLFTGLLKCADCGGPVHLLNPGIDKRAKVPKSVNYIVCKKGKFTRECILKRLRYDDFEITLLKAIQEINLADILDENNPLDILTKKLRTIEIKIDKNKKLLENFQKSFIENDGALPSFMIDGAKQAELEIKNLLVEKSQTEVEVSQLNIYNSNIDNAVEELKANGTYETRSKINLLFHEIIKSIVIDFELNDYAIMFKNGAKRFINDGIIQNVFRTTDNKQRESELEEILKWKRIQ

SEQ ID NO: 63017 - DNA, 50 bp, Pseudomonas carnis; identical to SEQ ID NO: 60027
  source 1..50: mol_type = genomic DNA

SEQ ID NO: 63018 - DNA, 40 bp, Pseudomonas carnis
  source 1..40: mol_type = genomic DNA
ccagggataggccgatttgatcagcacggcattgcccggg

SEQ ID NO: 63019 - DNA, 50 bp, Pseudomonas carnis
  source 1..50: mol_type = genomic DNA
cacaggtaaatcatggacgtgttgtgcaagtcaggcgtataatacccgta

SEQ ID NO: 63020 - DNA, 40 bp, Pseudomonas carnis
  source 1..40: mol_type = genomic DNA
gcaggaataggctgttttgtgcatcactgcatccccaaga

SEQ ID NO: 63021 - protein, 549 aa, Sinorhizobium meliloti
MNAKASPALASPGRAALYLRVSTGRQAEHDLSIPDQRRQLQAYCQAKGIAIAAEFVEPGASATDDRRPEFQRMMDAAAQKPAPFDFIIVHSFSRFFRDQFQLEFYVRRLAKNGIRLTSITQDLGDDPMSVMMRQIMALFDEYQSKENAKHTLRAMRENARQGYWNGSRPPFGYRIVAAEQRGARTKKKIEPDPDQVETVRLMFRLARIGSDDGPLGSRQIADYLNMRGIRTQTGGRWGVGAVHQILTRETYIGRHRFNVSGKRKGEHKSEDEIVDVAVEAIIDEQEFAEVQAVMRSRSPQLRAPRFVTAGTLLGGVCFCADCGGAMTLRTSGKGDQYRYYTCCTTARQGKSACRGRTIPMDELDTMVVAHLEERLLASERLEELLAGLLKRREEHAQRLKGRVAELRKQAADAEAKLTRLYEAIENGLAEMDDSNLKGRIVELKRIRDAARADADRAENRGEGDDNRVTPELLRRFGVEARKKIRDRDGGFRRHHLQALVQRVEVGADEIRIKGSKPRLLQTLVASGGNCGVETATHGVRSFVPNWLPG

SEQ ID NO: 63022 - DNA, 50 bp, Sinorhizobium meliloti
  source 1..50: mol_type = genomic DNA
tttcgttccgaattggctccccgggatcggcgaagacgcgaactatgaat

SEQ ID NO: 63023 - DNA, 40 bp, Sinorhizobium meliloti
  source 1..40: mol_type = genomic DNA
ttcgaaactggctcgccgggccggattcgaaccggcgacc

SEQ ID NO: 63024 - DNA, 50 bp, Sinorhizobium meliloti
  source 1..50: mol_type = genomic DNA
tttcgttccgaattggctccccgggttcggcgaagacgcgaactatgaat

SEQ ID NO: 63025 - DNA, 40 bp, Sinorhizobium meliloti
  source 1..40: mol_type = genomic DNA
ttcaaaacagtagagcagagtcggatttgaacctgtgacc

SEQ ID NO: 63026 - protein, 573 aa, Nocardia farcinica; identical to SEQ ID NO: 52911

SEQ ID NO: 63027 - DNA, 50 bp, Nocardia farcinica; identical to SEQ ID NO: 48542
  source 1..50: mol_type = genomic DNA

SEQ ID NO: 63028 - DNA, 40 bp, Nocardia farcinica
  source 1..40: mol_type = genomic DNA
ttcgacccgaacgggagagatggtgccgagtgtgggactc

SEQ ID NO: 63029 - DNA, 50 bp, Nocardia farcinica
  source 1..50: mol_type = genomic DNA
cgtgtcggttcgagtaagaacgttgtggtgcacacactgggacggtactc

SEQ ID NO: 63030 - DNA, 40 bp, Nocardia farcinica
  source 1..40: mol_type = genomic DNA
ttatgctgaaaagggagaagtggtgccaggtgggggactc

SEQ ID NO: 63031 - protein, 589 aa, Klebsiella pneumoniae; identical to SEQ ID NO: 47751

SEQ ID NO: 63032 - DNA, 50 bp, Klebsiella pneumoniae
  source 1..50: mol_type = genomic DNA
aaagccgtcgccggtaccatcggcaatactaaggtaaactacatcccatt

SEQ ID NO: 63033 - DNA, 40 bp, Klebsiella pneumoniae
  source 1..40: mol_type = genomic DNA
gctcggggtaaccatcggcaaatccgggtataacgtaccg

SEQ ID NO: 63034 - DNA, 50 bp, Klebsiella pneumoniae
  source 1..50: mol_type = genomic DNA
aaagccgtcgccggtaccatcggctatactaaggtaaactacatcccatt

SEQ ID NO: 63035 - DNA, 40 bp, Klebsiella pneumoniae
  source 1..40: mol_type = genomic DNA
gcactgagtaaccagcctctaattcggttgtaatgaaccg

SEQ ID NO: 63036 - protein, 515 aa, Atopobium minutum
MPDKRKKFKQNDNNLAIAYYRYSSSSQNDASIEEQQELVQLYAAEHGYSILKEYADRAMSGQDDNRPNYKLMLSEVAKLRPAVLIMWKNDRLGRDVLQLTYAKRKIREAGCSIEYVAENAPDVSTSQGKFTEAVMDAFAQMWSDSSRENIERRLRYNAKNALSNGQKILGYRTAADKRYEIDPAKAPVVQRIFHDYVDGKPMQQIADELNAQGITTALDRKFTVNGLRSVLKNDRYTGVYKYADIVIPDGMPVIIETDLFNKAQAMFAMNKRTGAGNRSKHMEGEPRYWLTGKLFCGECGSSMQGVSGTSKTGASHFYYYCKEQRHKRCEKKPVKAAFIEGLVQQLLKELLSDSENLMSLAVDAAAYYKERYVESSYLESLEKELADTQTALKNLVKAIEAGIFSETTQERLQELERRKKALTDAIETEKAKKELSEDEHSIKAYFGKFLYANLDDHEVRDMVLEYFVDKIYLYDDKVILTCRYSDADYEVDWEDFQKAKKVASGKVRPSRTQLH

SEQ ID NO: 63037 - DNA, 50 bp, Atopobium minutum
  source 1..50: mol_type = genomic DNA
aggttcgaccttcccgcactcaactccaccagaacgcgaagcgtcgaact

SEQ ID NO: 63038 - DNA, 40 bp, Atopobium minutum
  source 1..40: mol_type = genomic DNA
gggttcgatccccctaggctccaccaagaatatgcagccg

SEQ ID NO: 63039 - DNA, 50 bp, Atopobium minutum
  source 1..50: mol_type = genomic DNA
aggttcgaccttcccgcactcaactgcaccagaacgcgaagcgtcgaact

SEQ ID NO: 63040 - DNA, 40 bp, Atopobium minutum
  source 1..40: mol_type = genomic DNA
aggtctgatgcccctagcctggaccaagaactcgcagact

SEQ ID NO: 63041 - protein, 458 aa, Salinispora tropica
MNAGRHQVIVVHRYTDNDLVASRLDVFRPDFAQMLKDLKLGRTKDGYRLDGIICVHQDRLQRTDTDWEHFVHALLAKPGRLLWTPSGSSDLTDEGEIVKTGIMAVLNKAESMKKKRRIRDWHQDLILDGLPHSGPRPFGWNEDKMTLRAEEADYLAWAIRERIKGKALSTLCAEAKKRGLKGTKGGEIAPTTLSQMMTAPRVCGYRANRGTLALDENGAPIVGKWDTICKPEEWEAVCATFSPGSTYMHRGPGAPRVTGKPKTVKYLASQLLRCMNKVERDGETRICNGTLTGSPTKSARSPYTYRCGSCNKNSIAGPMVDRQITRLLLGKLGEAQITYRRPELAWHLESTLKTLADRLAGLENRWMAGEVDDEQFYRLSPGLQAEVRKLRAERARWELENAAGSEEPADIIRKWRSGELDLAQRRRILFDVFAAIQVTPGQKGSKTPNPHRLKPIWG

SEQ ID NO: 63042 - DNA, 50 bp, Salinispora tropica
  source 1..50: mol_type = genomic DNA
tcgtgagcgacgggatcgacgaggagtcgaagtgagcacgtcgatacccg

SEQ ID NO: 63043 - DNA, 40 bp, Salinispora tropica
  source 1..40: mol_type = genomic DNA
ccgatcctgccacaagaggagtgcgccaccggagcgtgtc

SEQ ID NO: 63044 - DNA, 50 bp, Salinispora tropica
  source 1..50: mol_type = genomic DNA
tcgtgagcgacgggatcgacgaggactcgaagtgagcacgtcgatacccg

SEQ ID NO: 63045 - DNA, 40 bp, Salinispora tropica
  source 1..40: mol_type = genomic DNA
acaaaacttccacaagatgactgtgccaacagagagggtc

SEQ ID NO: 63046 - protein, 538 aa, Pseudomonas chlororaphis
MAKNGARVYSYLRFSDPRQATGSSADRQLQYAQRWAAEKGLVLDESLSLRDEGLSAYHQRHVKQGALGVFLQAVEDGRIADGSVLVVEGLDRLSRAEPIQAQAQLAQIINAGITVVTASDGREYNRAGLKAQPMDLVYSLLVMIRAHEESDTKSKRVKAAIRRQCEGWIAGTYRGVIRNGKDPQWLRWDGQEFRLIPERVEGVRFVIELFRRGYGSVRIIREMAQRGLALTDKGVTALQVHRLVRLPALMGVKVLELEGESYRLDGYYPPILTADEFAELSALVDGRVKRKGRGEIPGLVTGLGISYCGYCGTAVVGQNMMFKARSDGSLADGHRRLICVGYSHNEGCPVGGSCSVVPIEKALMSYCTDRMNLSGLLEGSDQTQAIQARLATAKAEAVLIEQQLERVSEALLAAEGGASPLIFVRKARELEEQYAGKRKEVAQAERELVAVSNRDQPGLAEAWAQLASGVEALDYDARMRVRQLVRETFERIVVYHHGMQAAGREGKVIDLLLVGKGGQPRLLRIDRKTGDWQLGFGV

SEQ ID NO: 63047 - DNA, 50 bp, Pseudomonas chlororaphis
  source 1..50: mol_type = genomic DNA
gatctagattggttatcttaagggcaccctaacgatatcatacctacacg

SEQ ID NO: 63048 - DNA, 40 bp, Pseudomonas chlororaphis; identical to SEQ ID NO: 58458
  source 1..40: mol_type = genomic DNA

SEQ ID NO: 63049 - DNA, 50 bp, Pseudomonas chlororaphis
  source 1..50: mol_type = genomic DNA
gatctagattggttatcttaaggggcccctaacgatatcatacctacacg

SEQ ID NO: 63050 - DNA, 40 bp, Pseudomonas chlororaphis
  source 1..40: mol_type = genomic DNA
ataaatcagctctatctgggcagcaaggaaaacgaaccca

SEQ ID NO: 63051 - protein, 486 aa, Tsukamurella tyrosinosolvens
MSHNRIRPLRAVLYSRISEDPKRTGLGVQRQQQDCTALSKRMKFRVVANLCDNDKSAWKESVRRPDYEQLLEMVAAGEVDVIVAYKIDRIGRRLRTLIDLYELLLKHNVTIHLVAGDIDLTTSHGIAMAQMAAVMSENYVRTSREANLRGRVELAERGVRHCTRRPYGWEPGGLKVRPHEADVVREIVQRIIASQSPTSIARDLNHRSIPTAEGKRWTGVGVRKCAARASNAAIREHNGTLHYNGQWEPIISHDDYAAVTTALDERQLLVGRRGPGRKYLLTGFVFCGECGAKLGTTNGVGHRADAYRCYKRRSNDPLEIGCGRVSRNIAPLDHLISEAVLTRLDSPQMLDAINQASSADNGLAELLKQRHGYQESLDRLLADYYAPDNMLSPDQFRKIKAEREQQIGDVDQRISRMSYATSLKRSDLAGNLREVWASASIEWRRSVIDMLVDKVIVNRRAEREFKRVSYEGWRFDPELIDVVWKV

SEQ ID NO: 63052 - DNA, 50 bp, Tsukamurella tyrosinosolvens
  source 1..50: mol_type = genomic DNA
cgcgtggttgcttgacacatcgtgccgacgatggtcttgtaaccttgctc

SEQ ID NO: 63053 - DNA, 40 bp, Tsukamurella tyrosinosolvens
  source 1..40: mol_type = genomic DNA
cgcggccgccgctatggtgccgatcgcgtactccaccgtc

SEQ ID NO: 63054 - DNA, 50 bp, Tsukamurella tyrosinosolvens
  source 1..50: mol_type = genomic DNA
cgcgtggttgcttgacacatcgtgcggacgatggtcttgtaaccttgctc

SEQ ID NO: 63055 - DNA, 40 bp, Tsukamurella tyrosinosolvens
  source 1..40: mol_type = genomic DNA
cgccgccgccgctgtgatgcggagccggtgctgcgccggg

SEQ ID NO: 63056 - protein, 567 aa, Streptomyces viridochromogenes
MPTSSAADAPATFRRRKRASLYVRLSVAADAENLSLDGMIEDMRDLCARENLEEVALHIDDGKSGGRRDRDKFQAWLNDARTGACDVLVNPVTDRLTREGLNVAATILDIVEGKDPATGAPSHKPVRLVDCNGLDSLHGDAFRFRFVIQAEVGRSERERIRQRSRDRERRLKRAGRWGGGTAPFGYKAVPNPEKDEEGNPKGWVLVIEPAEAKAVREAADALLKTPPDAFNKVVRRMNHNGPAPRRADHWSRVTLRRVLTGDAILGRVSENGRPLRDAKGEIVAPFPPVLTLAQVTALRARLAGTGVQAKLADGRPSRVLSGLLTCHSCQADLTVHHSVRRYRVGKEKRLKEVPQITYRCPTRGYGGTCEKPVAVSAEPAEQHIVGLYLATVGHMPRYEERTTVSGLEEMAAVEEEIKEVLADLATNADADTFARLQQLQARQKELSEKDLTTRTELVPTGQTLAEYWAGAMVDDRRDLLDEAFEELTILPGKRGIKGFQEDRLIRRWAEDDEELDEDQEALLDALPAPAEAVKPSPDEVLAELAPYVETVKRLKADGVDVDSYLVM

SEQ ID NO: 63057 - DNA, 50 bp, Streptomyces viridochromogenes
  source 1..50: mol_type = genomic DNA
tacgtcctagccaggacttccgacacacccaaagtccccccaaggacgta

SEQ ID NO: 63058 - DNA, 40 bp, Streptomyces viridochromogenes
  source 1..40: mol_type = genomic DNA
ggtcacccgcaccttcgacacacccgagttcgccgggatc

SEQ ID NO: 63059 - DNA, 50 bp, Streptomyces viridochromogenes
  source 1..50: mol_type = genomic DNA
tacgtcctagccaggacttccgacccacccaaagtccccccaaggacgta

SEQ ID NO: 63060 - DNA, 40 bp, Streptomyces viridochromogenes
  source 1..40: mol_type = genomic DNA
ggacactgccacctaccacccactccagtccaccgagatc

SEQ ID NO: 63061 - protein, 502 aa, Faecalibacterium prausnitzii
MEFIREDCIYARQSVDRKDSISIESQIDFCKYELKGGSCRVFKDKGYSGKNTDRPEFQKLLGEIRKGKVRRVIVYKLDRISRSILDFATMMELFQEYDVEFVSSTEKFDTSTPMGRAMLNICIVFAQLERETIQKRVTDAYYSRCLKGFHMSGQAPYGYQLEPTVVEGIRTKKMVADPVAADHVRLMFEMYTEPETSFGDITRYFEEQGIKIYEKSMVRSFLSQLLRNPVYAQADLELYEFFKSQGAAIVNDASDFVGTNGCYLYQGRDVKEDKDRCLKDQILVIAPHEALIPSDTWLKCRKKLMANTTFQQGRKPKNTWLAGKIKCGHCGYALKATHVPNSTGYFRCTKRTENKGCPGCGKIRKEEFEQFIFSAMQEKFKDFQILHGREEKVNPKLTAYQVELAQVEAEIEKLLDTLTGANATLLAYANKKIEELDTRRQTISKAIAELSVETISPQQIKKLSYYLDNWESIDFDDKRKAADGLISTIKATSDRVQIEWKI

SEQ ID NO: 63062 - DNA, 50 bp, Faecalibacterium prausnitzii; identical to SEQ ID NO: 2062
  source 1..50: mol_type = genomic DNA

SEQ ID NO: 63063 - DNA, 40 bp, Faecalibacterium prausnitzii
  source 1..40: mol_type = genomic DNA
ccgggggtgctgctgacgtttgccttgccggaaagataat

SEQ ID NO: 63064 - DNA, 50 bp, Faecalibacterium prausnitzii; identical to SEQ ID NO: 17499
  source 1..50: mol_type = genomic DNA

SEQ ID NO: 63065 - DNA, 40 bp, Faecalibacterium prausnitzii
  source 1..40: mol_type = genomic DNA
ccgggcgtggtcctgacacctgccctgccgggaaggggac

SEQ ID NO: 63066 - protein, 568 aa, Actinokineospora spheciospongiae
MSKTTLNADTVMSAARKPVKRAVLYLRVSTPGQVHTDYDPEGISIPAQRQAGKIKADSLGAQVVKEFVEPGRTATSIDKRPTFKEMIAWVKLQKDIDYVIVYHFNRVFRNSVDAGLTKRDLKKVGTRIVSTVLDMGESPESSMVETILHAVDQYQSEASGADIRYKMSQKIKNGGTIGLAPLGYSNVREAKPEGGEIRTVTVDPERGPLIAKGIELFATGQYTAQEALEQINNAGLRTRGDRRRTPKPLSLSQFYEILGDRYYCGFVSYDDVEYPGRHQALITEETYQRVQRVLALRGGGGTRQRQHNHWLKGIIWCHRCGDRLVIAPGRGNGGTYFYYLCRGRQKRVCDLPYLAVDKVEKAVDRHLGTVRLRDDFQVAVRRQLDDTLLTEQGHLSSLKKQLRTRLDQLDTKEDNLLELLGDPDWPRAKIKHKLNTIERERVDIQSQLTDTTNKLEEGRQFFGAALTLLADPQGFHRRGSDAVKRAVTKVIFHKLHIDAEDVAGHTLTDGIHGLVQAGTTAGHPSSTPTDNEHGSVLDEDGAMSDLATDVDLLSVVLADHGSSRAAMV

SEQ ID NO: 63067 - DNA, 50 bp, Actinokineospora spheciospongiae
  source 1..50: mol_type = genomic DNA
cggttcgagtagagcggcgatggtggaactcctccgacggtacatgaacc

SEQ ID NO: 63068 - DNA, 40 bp, Actinokineospora spheciospongiae
  source 1..40: mol_type = genomic DNA
tcggccgaggtcgtctcgtggaggtgccgggaatcgaacc

SEQ ID NO: 63069 - DNA, 50 bp, Actinokineospora spheciospongiae
  source 1..50: mol_type = genomic DNA
cggttcgagtagagcggcgatggtccaactcctccgacggtacatgaacc

SEQ ID NO: 63070 - DNA, 40 bp, Actinokineospora spheciospongiae
  source 1..40: mol_type = genomic DNA
gcagcggaggtggtcccttccaggtgccgtctctcgatcc

SEQ ID NO: 63071 - protein, 480 aa, Rhodococcus hoagii
MRASIYTRISADHVGGGLGVERQRQDCEELATRLGWEIVEVFSDNDVSAYSSKPRPAYRRMLEAIEQGRVDAVIAWHTDRLHRRPSELEEFITLVEQHGVAIQTVKSGNLDLSTSAGKMVARLLGAVARAEVDSARDRMVRAHEQAAANGQWRARRRVFGWVKGGSEVVPAEATAIQAAAKAILSGTSLRAVARQWNEAGLETTGSAAKFDASAVRDILASPRCASIQVYKGREVGKGNWPSILTEDEHRALVALFANPARRRSVSYERRYPGSGIYRCGVCGAPMESHSDAKGERSYRCTESTSHVSRRSTTLDEHIAEQVLKRLARRNAHLLLERREDGVDLGALQVERDGLSERLSQLAGLFAAGDIDAAQLRDGTAALRTKIEAIDAKLAAAQTSSPLAGLVMASQSGFLVEQLWNDLSPDVRGKVIAELADVTILRAPRGQRKFQPEFVKIDWRKPLELTPEEAAPIVKLVQAGR

SEQ ID NO: 63072 - DNA, 50 bp, Rhodococcus hoagii
  source 1..50: mol_type = genomic DNA
acagtggaatgtcgaccttttacgggttctacaggccgacagaaccgtct

SEQ ID NO: 63073 - DNA, 40 bp, Rhodococcus hoagii
  source 1..40: mol_type = genomic DNA
agcggcatgggctttcacgggttctaccggcccaccgaat

SEQ ID NO: 63074 - DNA, 50 bp, Rhodococcus hoagii
  source 1..50: mol_type = genomic DNA
acagtggaatgtcgaccttttacgccttctacaggccgacagaaccgtct

SEQ ID NO: 63075 - DNA, 40 bp, Rhodococcus hoagii
  source 1..40: mol_type = genomic DNA
aggcccatgtcctttccagccttctccaggcccacctgat

SEQ ID NO: 63076 - protein, 545 aa, Sphingobium yanoikuyae; identical to SEQ ID NO: 36666

SEQ ID NO: 63077 - DNA, 50 bp, Sphingobium yanoikuyae
  source 1..50: mol_type = genomic DNA
ttacgacaaaggtggccttgggttcgctgggatctctcttttctttcaag

SEQ ID NO: 63078 - DNA, 40 bp, Sphingobium yanoikuyae
  source 1..40: mol_type = genomic DNA
ataccgtcatcccagcgaaggctggcatgacgaacggtgg

SEQ ID NO: 63079 - DNA, 50 bp, Sphingobium yanoikuyae
  source 1..50: mol_type = genomic DNA
ttacgacaaaggtggccttgggttgcctgggatctctcttttctttcaag

SEQ ID NO: 63080 - DNA, 40 bp, Sphingobium yanoikuyae
  source 1..40: mol_type = genomic DNA
ataccatcatcacagagaggccttccctgaccaccggggt

SEQ ID NO: 63081 - protein, 552 aa, Sphingopyxis macrogoltabida
MTTAAVKMEEAPVTATARAALYLRVSTGRQAESDLSIPDQRRQIEGYCLSRGWEVAAEFVEPGNTATDDRRPSFQAMIDAAMVKPSTFTVILVHSFSRFFRDQFQFEFYVRKLAKNGVRLISITQDLGDDPMSVMMRQIMTLFDEYQSKENGKHTLRAMKENARQGFWNGARAPIGYRVVAAGERGAKIKKKLEIDPIQAETVRRIYRMALNGVDNRGAMGLKSIATWLNENNIRTRDGGRWGLGAVHQVLTRTTYIGQHRFNTRDHKTKTPKPESEHAVMEVPPIVSEAEFEAVQRSLKARSPKMMAPMAVGGPTLLTGICFCACCGGAMTLRTGTSSVGREYRYYTCSTKARQGATGCPGITVPMDRLNEAVVDHLQDRLLDPARLEVLMDQILERRDEWVNQRRQHVADLERRATEAEAKLKRLYDAIENGVIDVSDSSLKDRIAELTATRDHAKGDAGRALTHIVKIGPAITPETLRAFAAALRKKLRNGDGTFARDQVRAVAQRVEVVSKTEVRIRGQRSELLRTLTAASGVEAAVLGVRAFEPKWR

SEQ ID NO: 63082 - DNA, 50 bp, Sphingopyxis macrogoltabida
  source 1..50: mol_type = genomic DNA
ttcgtgcctttgaaccgaaatggcgccccgtgcaggataaacataacgaa

SEQ ID NO: 63083 - DNA, 40 bp, Sphingopyxis macrogoltabida
  source 1..40: mol_type = genomic DNA
acgatatgaagggaatggcgcacccggaacgattcgaacg

SEQ ID NO: 63084 - DNA, 50 bp, Sphingopyxis macrogoltabida
  source 1..50: mol_type = genomic DNA
ttcgtgcctttgaaccgaaatggcagcccgtgcaggataaacataacgaa

SEQ ID NO: 63085 - DNA, 40 bp, Sphingopyxis macrogoltabida
  source 1..40: mol_type = genomic DNA
aagatctgcagcgagtggcagatccggaccgactggacct

SEQ ID NO: 63086 - protein, 567 aa, Burkholderia pyrrocinia
MKFFETSGVWGVAAKARVYSYLRFSDPKQAAGGSIDRQLEYAARWAADHEMELDASLSLRDEGLSAYHQRHVRQGALGVFLRAVEDGQVPAGSVLVVEGLDRLSRAEPLQAQAQLAQIVNAGITVVTASDGREYNRVRLKAQPMDLVYSLLVMIRAHEESDTKSKRVKAAIRRQCQGWIAGTWRAPIRVGKDPHWVRESEGGGFELIPERAEAVRHVIAMFRQGHGAVRIVRDLAERGLQVTDSGRTQSSNLYRLLANRMLLGEKSVEVDGEAFRLEGYYPALLTPTEFADLRYLAEQRGRRKGKGEIPGVVTGLGITHCGYCGAAVVAQNLMGRKRMSDGRPAPGHRRLHCVTYSIGAGCKMSGSCSVVPVERALMLYCSDQINLSRLLEGAAGTATVSAQLASARQRVAELEAQVQRVTDALLLDDGEAPVAVLRRVRELESQLASERRDVESLEHHLAASASSVAPAAADAWRDLVQGVENLDYDARMLARQLVADTFSRIVIYQSGFRPDVDDGTIGLLLIAKRGTTRMLHVDRRTGEWRAAEDIQSANILVAQTLFTTEKNA

SEQ ID NO: 63087 - DNA, 50 bp, Burkholderia pyrrocinia
  source 1..50: mol_type = genomic DNA
agtatacataacacatcttacgggcacccgagggataccatacctatacg

SEQ ID NO: 63088 - DNA, 40 bp, Burkholderia pyrrocinia
  source 1..40: mol_type = genomic DNA
gtcgacgagggctttcgggcacccgagcgatacgaaccct

SEQ ID NO: 63089 - DNA, 50 bp, Burkholderia pyrrocinia
  source 1..50: mol_type = genomic DNA
agtatacataacacatcttacgggaccccgagggataccatacctatacg

SEQ ID NO: 63090 - DNA, 40 bp, Burkholderia pyrrocinia
  source 1..40: mol_type = genomic DNA
gtggatgagggatttggagacccagagcaatgcttatcct

SEQ ID NO: 63091 - protein, 598 aa, Vibrio navarrensis; identical to SEQ ID NO: 61356

SEQ ID NO: 63092 - DNA, 50 bp, Vibrio navarrensis
  source 1..50: mol_type = genomic DNA
tgcgatactaatagtaacccaaccaatgaagagtgggtgatagcatcgca

SEQ ID NO: 63093 - DNA, 40 bp, Vibrio navarrensis
  source 1..40: mol_type = genomic DNA
agcgttggtggtgccaaccaacgaggaattcgtgatcgcc

SEQ ID NO: 63094 - DNA, 50 bp, Vibrio navarrensis
  source 1..50: mol_type = genomic DNA
tgcgatactaatagtaacccaacccatgaagagtgggtgatagcatcgca

SEQ ID NO: 63095 - DNA, 40 bp, Vibrio navarrensis
  source 1..40: mol_type = genomic DNA
cgtgctggtggtgaccacccacgaggaccctgtcattgcc

SEQ ID NO: 63096 - protein, 523 aa, Nocardia nova
MRALIAVRLSRVTDATTSPERQIATCRELCEGRGYEVVGIAEDLDVSAGKTSPFDRPQLGRWLTTPAEYDVIVFFRVDRIVRRLFDLADLIRWARLHDVTLVSATESHFDLSSSFGDIIALLVAKVAEMELEAISERNASAFRHNIRQGKWRGGVPPWGYLPERVDNDWRLVPDPVQVNVIQEVVQRVLRGDTLRAIAHDLTGRGVLTAKDRFAQVSGRAVKGYEWHSAPLKRALTSQTLLGRVVTREPLTDAQGRIQRDAKGRKVFGPETVVVGEDGSPIVRAEPVLTRDMFDRVGKELEGRENRKEPTARTTALLLRVLYCGVCGKPAYRLKGSPGRKARYRCASAQYKDQCANRSIPLDWAEAELERRLIMNMGPMERRQRVWFAGNDHTTELDEVNDTLADLTDQLGTGMFKRGTPQRDRLDQRIAALTARQEELSATPNEPAGWRWEPTGEIFSDWWARQDNEARNVWLRQMGFRVVWTSHTEGTRTVVDEFRLDGDLSLNLDADQLFGPIWEIVTGK

SEQ ID NO: 63097 - DNA, 50 bp, Nocardia nova
  source 1..50: mol_type = genomic DNA
cgggtgtaaaaccgaacgatcgcgtagtcggtagttgtcgattacacccg

SEQ ID NO: 63098 - DNA, 40 bp, Nocardia nova
  source 1..40: mol_type = genomic DNA
ggcgatcgtgccgatggcgtattcggcggtactcatcccg

SEQ ID NO: 63099 - DNA, 50 bp, Nocardia nova
  source 1..50: mol_type = genomic DNA
cgggtgtaaaaccgaacgatcgcggggtcggtagttgtcgattacacccg

SEQ ID NO: 63100 - DNA, 40 bp, Nocardia nova
  source 1..40: mol_type = genomic DNA
gaagctggtgctgaaggcgggctcggccgtgaacatcccg

SEQ ID NO: 63101 - protein, 534 aa, Geobacter sulfurreducens
MAEIADNDRKCALYVRVSTINQAEDGESLDEQVQTLKSYCSYRKWQNCTVYREEGFSGKDLKRPAFQQMVADIRKGKINTVIVKKIDRLSRSIIDFENVYKSFQDQGVDLISTQENFDTSTAIGRSVIRIVLIFAQLEREQTSERTIDVMAHRAKQGMFNGGYPRLGYDIDYENKCLVPNEDEIPIAKEVFTTYLKLGSLSETAKSLNDRGYRVKTWTTQAGRTRGGDKFQKNNVSRMLNDPVYIGKVRYKSGIYDGQQPAIISEELFEAVQTILQANNISKTGYRQNENTFYLKGLVRCGSCRSSMSPSFSYSKGKKYYYYRCMVNNDHSKDQCRIGSVHARKLEDLVVNELKFLAGDPRIIDGVVENASKEQREKVKALAAKKKVLTDRLTQVDKKAKNLLEVLGEGGTQNNRSGYITKELDGLELQAKQMRKEIEAIEFESNDLENKILSADMIRENFKIFKDVYDHLTHDEKYDLLHLLVKKVVYFEEEGKDKDGKKVGKIKMDLWELPPIDPSILSSAKDFAERLVWLP

SEQ ID NO: 63102 - DNA, 50 bp, Geobacter sulfurreducens
  source 1..50: mol_type = genomic DNA
attttgctgagcgtcttgtttggctccccacgcgggactcccaccgcaat

SEQ ID NO: 63103 - DNA, 40 bp, Geobacter sulfurreducens; identical to SEQ ID NO: 58448
  source 1..40: mol_type = genomic DNA

SEQ ID NO: 63104 - DNA, 50 bp, Geobacter sulfurreducens
  source 1..50: mol_type = genomic DNA
attttgctgagcgtcttgtttggccacccacgcgggactcccaccgcaat

SEQ ID NO: 63105 - DNA, 40 bp, Geobacter sulfurreducens
  source 1..40: mol_type = genomic DNA
cggccatggattttagagccagaccgccaggactagaacc

SEQ ID NO: 63106 - protein, 587 aa, Sterolibacteriaceae bacterium
MVEVCRVVDTVLIDQEMVYAPRQSNDRLLLGLKGSLNEYELDLLRQRSVEARREKARRGELLVVSPVGYRKGQQRLEKDPDRRVQEAIRLVFQKLGELGSVRQTLLWFLEHGLELPATNAHEEVRWKRPSYGMLYSMLTNPAYGGAYAYGKTEQLTQYEDGKARQTVRRKPREQWLSLIPGTHEGYVSWESFERLQASISENVIRCAHSGAAQRGPALVAGLLRCRRCGHNLVVHYTGSRHDVLRYQCSRGWLDNGEPRCIGFAGLLVDQAITREILRVVEPAAIEAAVMAHQEQARKTDEVLAALQRDLEAAQYSARRAHKQYDAADPENRLVTDELERRWNQSLQRVREVEAQIEQHRDRQGPSAAPRLEEFADLAADLQSLWHDGETDPRLKKRVIRTLIRDIIVDVDAQAGEVILVIHWKGGVHTELRLPRRRRGQNRTQTSTEVLEAVRVLAHTCSDQVIAGALNRNGLLTGRGNRWTQERVTALRSHHHISCYRAEQADSATWMNLTEAAQQLGISPRTLRLAVERGEIQAQHPLADGPWVFHRDTLQTAAAATLIERVTSRNRQPAVPNTEQATFEFSST

SEQ ID NO: 63107 - DNA, 50 bp, Sterolibacteriaceae bacterium
  source 1..50: mol_type = genomic DNA
gaggtggggcaccatgaagcgtggttgtacaaatcatcaatcgaacaccc

SEQ ID NO: 63108 - DNA, 40 bp, Sterolibacteriaceae bacterium
  source 1..40: mol_type = genomic DNA
actgtggcgccgctcggtattgtagtagccaaagtaagcg

SEQ ID NO: 63109 - DNA, 50 bp, Sterolibacteriaceae bacterium
  source 1..50: mol_type = genomic DNA
gaggtggggcaccatgaagcgtgggcgtacaaatcatcaatcgaacaccc

SEQ ID NO: 63110 - DNA, 40 bp, Sterolibacteriaceae bacterium
  source 1..40: mol_type = genomic DNA
attgtgccactgcactgtagcgtaggtgacaaagtaagac

SEQ ID NO: 63111 - protein, 514 aa, Oribacterium sp
MNTATSVLPSSYVICAYVRLSIEDEDVGGLKVESGSISAQRKLIHRYIDNHPEFAKCQVIERCDDGYSGTHFDTRPQFTDMIEQCKKGRINCIIVKDCSRFGRDYVELGDYLEQFFPFMGIRFISINDGYDSETYEGGLDIAFKNLIYDFYSRELSVKVKQAKVRLAEQGKYSAGQALYGYLKKKGDKHSLELDPKSAPIVREIFDMRLSGMRLVDIARNLNDRGIPCPTALCWKEGRVATRHNKGRKLYWTGGVVGQLLGNEMYTGCVINFRSGVEERGGKQVQKPEEEWVKVEGMHEAIVSKEEFQKVAAMVKEIKKPEPVRHPMHYYCGVCGRKLLRLNPITIHCGMEYALSEPSECDGVRIKWKEADAAVLDELKEKLLRILRAEELRLEKAKKEIPLKEEIESVENAIVAANDAKSQLIRKMAERSMSRDVFLDKKKKQDEQIAELEQRLSDLKTKELMQRDKGIDTDEIRSFLDVSEMTEKEWDRFIDKVVLYPNHKMVIQWKFEEEL

SEQ ID NO: 63112 - DNA, 50 bp, Oribacterium sp
  source 1..50: mol_type = genomic DNA
tttagtgaatacttgacagcatcgggtgagggcgttattataggactaag

SEQ ID NO: 63113 - DNA, 40 bp, Oribacterium sp
  source 1..40: mol_type = genomic DNA
accgaacggcgtaatcttaggtacgcctggttccggtaaa

SEQ ID NO: 63114 - DNA, 50 bp, Oribacterium sp
  source 1..50: mol_type = genomic DNA
tttagtgaatacttgacagcatcgactgagggcgttattataggactaag

SEQ ID NO: 63115 - DNA, 40 bp, Oribacterium sp
  source 1..40: mol_type = genomic DNA
acccagaggggtaatcataactatgccaggtaccagtgat

SEQ ID NO: 63116 - protein, 517 aa, Oscillospiraceae bacterium
MKAAIYCRLSEEDRNKQFETDDSNSIQNQKAMLLQYAMEQGWEVYNLYSDDDYTGSDRRRPEFNRLLEDAKAHRFDIVLCKTQSRFTRELELVEKYIHGLFPIWGIRFVSIVDNADTANKGNKKSRQINGLVNEWYLEDMSENIRSVLTNRRQNGFHIGAFALYGYQKDPDQKGHLIIDEEAAAVVREVFTLFSQGYGKTAIARMLNDRGIPNPTEYKRLHGLRYQQPRRKNSTLWKYFAISDMLTNEIYIGNMVQGKYGSVSYKTKQNKPRLQSEWFRVEGTHEAIIERSLWNRVQSMIAERAKPFDCGTVGLFARKAICANCGYTMRSSKNRGRHYLQCSNRHVAKDACIGSFISVEKLERMVIDELNRLAAAYLDKDDLERSIEFCENLQGQKKQLLDALSAYEKKIAEYTKGLRDLYMDKVKGLLNDSDFSALSKEFSSEKSRLERVLLDGQRQLAELEDRIAAGDNRKALVERYINLEHLTREIVEILIDHITVGKRIPGTRDVPIEIHWNF

SEQ ID NO: 63117 - DNA, 50 bp, Oscillospiraceae bacterium
  source 1..50: mol_type = genomic DNA
agttgtacttttgtgattgcaccagatggggcgatggcgtaagggcaaca

SEQ ID NO: 63118 - DNA, 40 bp, Oscillospiraceae bacterium
  source 1..40: mol_type = genomic DNA
gacagaggatttggcggcggagcaaaaagcccgcgtaacc

SEQ ID NO: 63119 - DNA, 50 bp, Oscillospiraceae bacterium
  source 1..50: mol_type = genomic DNA
agttgtacttttgtgattgcaccacatggggcgatggcgtaagggcaaca

SEQ ID NO: 63120 - DNA, 40 bp, Oscillospiraceae bacterium
  source 1..40: mol_type = genomic DNA
gacagcggactcggcagcgcagcaagaaagctccggaatc

SEQ ID NO: 63121 - protein, 503 aa, Angelakisella massiliensis; identical to SEQ ID NO: 11

SEQ ID NO: 63122 - DNA, 50 bp, Angelakisella massiliensis
  source 1..50: mol_type = genomic DNA
ctatcgcgtggttttctttacacaataaatatccccccgcaaagcggggg

SEQ ID NO: 63123 - DNA, 40 bp, Angelakisella massiliensis
  source 1..40: mol_type = genomic DNA
tcggcggctccggcataaaacaaggacgcccgacaacggt

SEQ ID NO: 63124 - DNA, 50 bp, Angelakisella massiliensis
  source 1..50: mol_type = genomic DNA
ctatcgcgtggttttctttacacatcaaatatccccccgcaaagcggggg

SEQ ID NO: 63125 - DNA, 40 bp, Angelakisella massiliensis
  source 1..40: mol_type = genomic DNA
aaggcagctcaagcagaactcaaggaggcccgacgccagt

SEQ ID NO: 63126 - protein, 477 aa, Acutalibacter muris
MLGAIYARYSAGPNQTDQSIEGQVADCQAYAERNGIQIVEIYADRHISGKSIVGRNEFQRMLHDAEQHRFECVIVWKIDRFGRDRQDIALSKMKLKKAGVRLLYAEESVPEGPEGIILESVLEGLAEYYSADLRQKIVRGMRETAKKGQYCGAPLPIGYTVDDEKHIIVDEEKAAVVREAFWMHNAGAQTKELVELFRKHGVTGQRGKPITQAVIYRMLRNEKYLGRFEIQGVEILTDPIIDLATFEEAAKHFGTPRNNAAGRAKVDYLLSCKCFCSYCGAMLNGESGTSKTGKVYHYYKCGAKKRGEKCELKPIPRDHFEDRVIEATVEDMLTEDMIEKLTVRILEIQEQEDALDPAAAYRKQLDSNRKRQRNILDAIEEGTGARGLAGRLAELEAEEEELLVEIERAEMKKPRLTSEAVGAWLRSFRNGDTKDAAFRQRLVDTFIARIEVRNGQAMIFYNIQEKGPHSKVRVRSE

SEQ ID NO: 63127 - DNA, 50 bp, Acutalibacter muris
  source 1..50: mol_type = genomic DNA
tcaaaagttcgagtacggtccgaatgtgcggtggatacgaaaaagatatt

SEQ ID NO: 63128 - DNA, 40 bp, Acutalibacter muris
  source 1..40: mol_type = genomic DNA
tgttcgtatacttgacggttggtggagatggcgggagtcg

SEQ ID NO: 63129 - DNA, 50 bp, Acutalibacter muris; identical to SEQ ID NO: 63127
  source 1..50: mol_type = genomic DNA

SEQ ID NO: 63130 - DNA, 40 bp, Acutalibacter muris
  source 1..40: mol_type = genomic DNA
tgttggtatatttggagggtggtggaggtgaatggtgtca

SEQ ID NO: 63131 - protein, 548 aa, Acutalibacter muris
MQPTMTAPQKVVRKIPAKIDIAEEIKQAHRQLRVAAYCRVSTAQEEQLNIYDVQVRYYTEKIRSEPKWAFVGIFADRGLSGTSTKKRDEFNKMIKMCRRGKIDMIITKSISRFARNTADVLKYVRMLKEIGVDIFFEEQNIHSTQPGAEFYITIYGSIAQSESENISANVIWGKNQSAKEGKVPFQYKRFLGYRRGPDGKPEIDPEQAEVVKRIYERFLAGDSMTTIANDLTADGIPTPTGSGKWVPGTIQSIISNEKYAGNAVLNKTYVVDCISKKVRRNDGKARPMYFVENNHPAIIDPATFGRAQEELARRTGKRKVKQKGTKTEQGRYSSKYALTELLVCGECGTPYRRCTWTVKGEKKPVWRCINRLDFGKRYCHHSPTMEESVLQEAVMAAIMRTAKQSADVLGTLKLHIGMGLKNDSGEDNSLDIQIRIAEIDAQFKAMLQAIATDTVEDFDEQRATALMSEKNSLEQQLAQLDNAQQEKENEESRLDEIFTILDGLENHPMEYDDRLVRQVLECVVVESKERIKVIFAGGLEVEQAIEKA

SEQ ID NO: 63132 - DNA, 50 bp, Acutalibacter muris
  source 1..50: mol_type = genomic DNA
aatatctttttcgtatccaccgcacattcggaccgtactcgaacttttga

SEQ ID NO: 63133 - DNA, 40 bp, Acutalibacter muris
  source 1..40: mol_type = genomic DNA
cgactcccgccatctccaccaaccgtcaagtatacgaaca

SEQ ID NO: 63134 - DNA, 50 bp, Acutalibacter muris; identical to SEQ ID NO: 63132
  source 1..50: mol_type = genomic DNA

SEQ ID NO: 63135 - DNA, 40 bp, Acutalibacter muris
  source 1..40: mol_type = genomic DNA
tgacaccattcacctccaccaccctccaaatataccaaca

SEQ ID NO: 63136 - protein, 551 aa, Pseudomonas aeruginosa
MPTAYAYIRYSSKAQGEAGRDSVDRQMASIQAITKQQGIELRPENIFSDTGVSGFDGSNKNKGKLKDLIDLIINQKIQEGDFVFVESIDRLSRQKMRLSKDLVYTILDRGVTLVTTIDGQMYSRNKDGMEQDIMLSVIAQRAHEESKTKSIRRKSAWNRAKNLADEEKTIFNGHNPPYGISFNKEENRFEIVEEEAQEIRDIFESLKYVGVSLTIKKVNEYSKRKWTNRNIKHLLDTKYVLGSYMAQKRDENKKKVFERYIENYYPQIVSFELFNEAVASMKNRAHRKHYGNQTVGSLNIFRHSIKCSNCNASMLFEKQTNPKGVVYPYFQCFTRKELKNGCDQPRFRFDLAFGVFLELVKFATTSSETINPNEWNNETASVGSFHKTLFKLLTSTEKDKELEKKISHVKNLLLEQKNYQDNINKSFEAFTDGIIPAAFIKKASETEIKIEALERELAELNIESSTRNVSLMVHSYNDIIDLYSTEAGRLKINSFFTSNNIAFSFSFDQKARMLRCKIYYKDIHVDVINKKFPLHNPLKEFGIDNLNQYFN

SEQ ID NO: 63137 - DNA, 50 bp, Pseudomonas aeruginosa
  source 1..50: mol_type = genomic DNA
gtgtgatattcacccctaccattcgagactggcaggtggtattctcacac

SEQ ID NO: 63138 - DNA, 40 bp, Pseudomonas aeruginosa; identical to SEQ ID NO: 22678
  source 1..40: mol_type = genomic DNA

SEQ ID NO: 63139 - DNA, 50 bp, Pseudomonas aeruginosa
  source 1..50: mol_type = genomic DNA
gtgtgatattcacccctaccattccagactggcaggtggtattctcacac

SEQ ID NO: 63140 - DNA, 40 bp, Pseudomonas aeruginosa
  source 1..40: mol_type = genomic DNA
ggtcctgcacgggctgctgcacatctttgcgctcgtcatc

SEQ ID NO: 63141 - protein, 551 aa, Pseudomonas aeruginosa
MPTAYAYIRYSSKAQGEAGRDSVDRQMASIQAITKQQGIELRTENIFSDTGISGFDGSNKNKGKLKDLIDLIISQKIQEGDFVFVESIDRLSRQKMRLSKDLVYTILDRGVTLVTTIDGQMYSRAKDGMEQDIMLSVIAQRAHEESKTKSVRRKSAWNRAKKLADEEKEIFNGHNPPYGISFNKEENRFEIVEEEAQEIRDIFESLKYVGVSLTIKKINEYSKRKWTNRNIKHLLDTKYVLGSYMAQRRDENKKKVFERYIENYYPQIVSFELFNEAVASMKNRAHRKHYGNQTVGSLNIFRHSIKCSNCNASMLFEKQTNPKGVVYPYFQCFTRKELKNGCDQPRFRFDLAFGVFLELVKFATTSSETINPNNWDNEAASVGSFHKTLFKLLTSTEKDKKLEQKISHVKNLLLEQKNYQDNINKSFEAFTDGIIPAAFIKKASETEIKIEALERELAELNIESSTRNVSLMVHSYNDIIDLYKTEAGRQKINSFFTSNDIAFSFSFSQKTRMLRCKIYYKGIHVDVINKKFPLHNPLKEFGIDNLNQYFN

SEQ ID NO: 63142 - DNA, 50 bp, Pseudomonas aeruginosa; identical to SEQ ID NO: 63137
  source 1..50: mol_type = genomic DNA

SEQ ID NO: 63143 - DNA, 40 bp, Pseudomonas aeruginosa; identical to SEQ ID NO: 22678
  source 1..40: mol_type = genomic DNA

SEQ ID NO: 63144 - DNA, 50 bp, Pseudomonas aeruginosa; identical to SEQ ID NO: 63139
  source 1..50: mol_type = genomic DNA

SEQ ID NO: 63145 - DNA, 40 bp, Pseudomonas aeruginosa; identical to SEQ ID NO: 63140
  source 1..40: mol_type = genomic DNA

SEQ ID NO: 63146 - protein, 466 aa, Pseudomonas aeruginosa
MDRICYSRDNEEDDLKTIMMIALIAKRANEESATKSWRGKESWRKQKELATSGVAKINIKRPPYGLDFDSNKSMFIVNEAEASEIRKIFSLLKYMGVSNAIREVNKNSKRKWAGRHVIHMIRTQYPLGVLRSQKRTSDDRKEFVEYIEGYYPPILSQSEFNEAVSAMQGRRDRKDYGNTSFEDFNIFRSVAKCHSCGGSLLFEKQKNPKGVVYFYLHCHSRKELKGGCDQRFRFDLAFGMLLVFVEFSINSNKPVGYLRFKRPQSLSAREVKNESGFIRRGIKVDPDIKAKYLSAVQGAHGAFIDLFSGPTPSDMKFSEELAVAKKELQKAEGEYERYGQSIERYDGDIPVFVMKKLSELERDIAARIGEVEKLTREVNDAKVSIPVFGRQDVIELFRTRTGRLELNRFFVAKKIKFRFQYRAAERTLDMTVFRDDVQILQVPCRFPLHKPLGMFDLPNLAEFCEV

SEQ ID NO: 63147 - DNA, 50 bp, Pseudomonas aeruginosa
  source 1..50: mol_type = genomic DNA
aatgtgagaaagatactaccgttctcgaacggcaaggtgtatcctcacac

SEQ ID NO: 63148 - DNA, 40 bp, Pseudomonas aeruginosa; identical to SEQ ID NO: 59713
  source 1..40: mol_type = genomic DNA

SEQ ID NO: 63149 - DNA, 50 bp, Pseudomonas aeruginosa
  source 1..50: mol_type = genomic DNA
aatgtgagaaagatactaccgttctggaacggcaaggtgtatcctcacac

SEQ ID NO: 63150 - DNA, 40 bp, Pseudomonas aeruginosa
  source 1..40: mol_type = genomic DNA
gatgacgagcgcaaagatgtgcagcagcccgtgcaggacc

SEQ ID NO: 63151 - protein, 577 aa, Pseudomonas aeruginosa
METLKIDRSKPLAIAYVRWSSTVQGGDDKDSYDRQTSPLEFFTSSTGVPVVETIIDPGQSAFTGENSKKGKLKGILDRIESGEIRKGDFLVVESIDRITRMRVLDGVALIQDGILKKGVKLYTTTDNKIYSYEDPDKDFENLLMISLIAKRANEESEIKSKRRRSAWSKAKTKATDGVPFNAHNLPYGLRHNLETNSFEIVEEEAQEIKQIFEGLKYEGVSNTLKKVNLKSKRKWSRKTVHLMLTSRYPIGTLMSQKRDGKKKVFERYIENYYPAILSHKEFQDALQAMKLRGKVKDYGRNTEGYLNIFKHCVKCAACGQSLMFEKSINQKGIKYGYFHCYTRKETLSHCDVPRFRFDFAFGTLLQLVRQLTCEDDDFDVHPWAREMPADYKSTMADDEINMENFENQFLSLFSKSTATEAIKTEFYEAENELAKSKSLYENMTASFSQYKDGRIPSFFIQQMADAELAYENAKANIDALSTQIDNAESSLEIYSYRDIIELYSTDEGRLKLNHFFKSNGLKFVFNYEAKTRTVFMVVRDKKDAEIYRIGKKFTLHNPLKEFGIDNLNEHMNAVVKI

SEQ ID NO: 63152 - DNA, 50 bp, Pseudomonas aeruginosa
  source 1..50: mol_type = genomic DNA
tgtgtgagaaaagtctacccctttgagagcggatagacgtatcatgcact

SEQ ID NO: 63153 - DNA, 40 bp, Pseudomonas aeruginosa; identical to SEQ ID NO: 22678
  source 1..40: mol_type = genomic DNA

SEQ ID NO: 63154 - DNA, 50 bp, Pseudomonas aeruginosa
  source 1..50: mol_type = genomic DNA
tgtgtgagaaaagtctacccctttcagagcggatagacgtatcatgcact

SEQ ID NO: 63155 - DNA, 40 bp, Pseudomonas aeruginosa; identical to SEQ ID NO: 63140
  source 1..40: mol_type = genomic DNA

SEQ ID NO: 63156 - protein, 576 aa, Pseudomonas aeruginosa
METLKIDRSKPLAIAYVRWSSTVQGGDDKDSYDRQTSPLEFFTSSTGVPVVETIIDPGQSAFTGENSKKGKLKGILDRIESGEIRKGDFLVVESIDRITRMRVLDGVALIQDGILKKGVKLYTTTDNKIYSYEDPDKDFENLLMISLIAKRANEESEIKSKRRRSAWNKAKTKATEGVPFNAHNPPYGLRYDPDGNCFEIVEDEAVEIKKIFEGLKYEGVSNTLKKVNLTSKRKWSRKTVHLMLTSRYPIGTLMSQKREGKTKVFERFIENYYPAILTHKEFQDALQAMKQRGKVKDYGRNTEGYLNIFKHCVKCAVCGQSLMFEKSINQKGIKYGYFHCWTRKETLSHCNLPRFRFDFAFGTLLQLVKQLTCDEDYDVHPWASEMPSDYNSTMADDENDIENFENQFLSLFSKSTATEAIKTDFYKAENELAKAKTIYENLTASFSQFSDGRIPSFFIQQMSEAEQAYEKAKADVDALGAQIDNAENSLEIYSYKDIIELYSTDEGRLKLNHFFKSNGFKFIFNYEPKTRTVFMTVKDKVDAEIYRVGKKFTLHNPLKEFGIDNLNEQMNSVLKV

SEQ ID NO: 63157 - DNA, 50 bp, Pseudomonas aeruginosa
  source 1..50: mol_type = genomic DNA
tgtgtgagaaaagactaccctttggagagcgggtaggcgtatcatacact

SEQ ID NO: 63158 - DNA, 40 bp, Pseudomonas aeruginosa; identical to SEQ ID NO: 22678
  source 1..40: mol_type = genomic DNA

SEQ ID NO: 63159 - DNA, 50 bp, Pseudomonas aeruginosa
  source 1..50: mol_type = genomic DNA
tgtgtgagaaaagactaccctttgcagagcgggtaggcgtatcatacact

SEQ ID NO: 63160 - DNA, 40 bp, Pseudomonas aeruginosa; identical to SEQ ID NO: 63140
  source 1..40: mol_type = genomic DNA

SEQ ID NO: 63161 - protein, 546 aa, Brucella oryzae
MNIQSPHVALRAALYLRVSTTRQAEHDVSIPDQRKQGEAYCAARGYELVETFVEAGASATNDKRPEFQRMIEDGTSKPAPFDVVVVHSFSRFFRDHFELEFYVRKLAKNGVKLVSITQEMGDDPMHVMMRQIMALFDEYQSKENAKHVLRAMNENARQGFWNGARPPIGYRIIAAEQRGSKTKKKLEIDPLHAETVRMIYRLFLEGDGNTGPLGVKAITCYLNERRLFTRDGGRWGLAQIHAILTRTTYIGQHRFNTRTHKNREKKPESEVAIMEVPPLIEREVFHLVQARLKSRHPSLVPARVTSGPTLLTGICFCSKCGGAMTLRTGRGSTGAEYRYYTCSTKARQGKTGCVGRTIQMGKLDDLVANHLDERLLVPARLEKILSSLLDRRSDRAERRREQLAEINRRVTETEARLNRLYDAIEAGLADLNDENLKERMTSLKAIRDQAKAEAERLQATLDSSGNQTITVDMLDSLSSAARAGLRLEEGGYRREHLRALAQRVEVADDEVRIMGSKAELLRTLVAASSGKSAAFGVSGSVLKWRA

SEQ ID NO: 63162 - DNA, 50 bp, Brucella oryzae
  source 1..50: mol_type = genomic DNA
gcgttagtggttctgtactgaaatggcgcgccgcaccgagcgatgatgac

SEQ ID NO: 63163 - DNA, 40 bp, Brucella oryzae
  source 1..40: mol_type = genomic DNA
gtaggttcgaatctcttccggcgcgcccggcaggattcga

SEQ ID NO: 63164 - DNA, 50 bp, Brucella oryzae
  source 1..50: mol_type = genomic DNA
gcgttagtggttctgtactgaaatttcgcgccgcaccgagcgatgatgac

SEQ ID NO: 63165 - DNA, 40 bp, Brucella oryzae
  source 1..40: mol_type = genomic DNA
gaaggtcagagtcttttccttccagcccagcaggagtggg

SEQ ID NO: 63166 - protein, 630 aa, Vibrio splendidus
MLVCSPVNLVHFMKIEKSLVPQVYSYNRFSDMEQKKGSSLARQENYALKAAKEYGLELNEELIMTDLGKSAFHANHKKTGSYGVFLNAVNKGLVAKGSYLIVESFDRLSRQQARLAQIDIGQLIEADINIITASDNQLYNKKTLDQNPHLLFTMAAIMIRAHEESLMKQKRSISSIEEKLGKFRSGESVDVGGPVPFWIERNRLGSDKLFEFSEKTPAARIITSSFLEGKSYGQIQDLLTKTGIRTPKGDDKWGTTTISNILQSESLYGRKTVRLPALKDGSKDAQEHLLDGYYPALISKSDFDLIQQIKKVKKKGRTGYRFNSVKDDEVKSVVYLLSGYGRDKDRKSRSVCSKCGGGLGSRLVDQYTRKKKYVRTVMRLDCLNRTRKKSCDAKGIAQRELEKSFLLAISEHVDYSLLNKEDSDVRAVEVIDSKIDELDGIIERASDLYLLGKSSSVRDKAKSQLDLAETEREELLKDKVDGKELIISAESIKEFEGYIHRAHENDDDFEARSYVKDILLQCVEKLIVDTEPRPVESLGYKNLYKNARVWTVTVDFRSGKRITVYHDCDTNMSLFNQIEGGASTFHSYTPEALSILDNQGPEAFAQHLRETGFGANTGYVQDFISSLEGK

SEQ ID NO: 63167 - DNA, 50 bp, Vibrio splendidus
  source 1..50: mol_type = genomic DNA
ttacattactatgctgtcggtctgtctgctgtgtaatgtgacttgcgaag

SEQ ID NO: 63168 - DNA, 40 bp, Vibrio splendidus
  source 1..40: mol_type = genomic DNA
taaccgaatgcgccgtctgtccagtggatatcttgcatac

SEQ ID NO: 63169 - DNA, 50 bp, Vibrio splendidus; identical to SEQ ID NO: 63167
  source 1..50: mol_type = genomic DNA

SEQ ID NO: 63170 - DNA, 40 bp, Vibrio splendidus
  source 1..40: mol_type = genomic DNA
taacccaattaaccttctatcccatggctatcttgcaaag

SEQ ID NO: 63171 - protein, 533 aa, Mycobacteroides abscessus
MLAFDRVEPGAYDHTMTTTKPRSRALIAIRLSRVTDATTSPERQLAACEELCAARGYTVVGVAQDLDVSGGKTSPFDRPQLGKWLKRPQDFDVIIFMRVDRIVRRLFDLADLIRWSRQHGVTLVSATESHFDLSTEFGDIIALLVAKVAELELQAISERNASAFRYNFSKGKYRGGMPPWGYRPERDDNGDWRLVQDPVQVAVIHEVIDRVLLGEPLRAIAHDLTSRGVFTPRDRFAELQGRPTRQYAWHSGPLKRALTSQTLLGRAITRDVAVLDDAGRPIVRSEPIITRDVFDRLATELAGRENRKEPTKRSSGLLLRILYCGECGRAAYRLKGGKGRKPRYRCASSQYRESCGNRSIQLEWAEDELERRILEHLGPVERRRRVWDPGSDVSDELGEVNAELADLAESLGTPGFRRGTPQRETLDRRIEALSVRQAELSQVTPKPAGWVYEGTGVTVQEWWEDATTEERNVWLRQLGMRVVYRSHTEGTRTVVDEFRIDGDLTLDLDAEHALGPVWDVVQMMLSELPSDQS

SEQ ID NO: 63172 - DNA, 50 bp, Mycobacteroides abscessus
  source 1..50: mol_type = genomic DNA
ggggtgcaaaactcatttttcgactacgcgaatgttggcgtttgatcgcg

SEQ ID NO: 63173 - DNA, 40 bp, Mycobacteroides abscessus; identical to SEQ ID NO: 29268
  source 1..40: mol_type = genomic DNA

SEQ ID NO: 63174 - DNA, 50 bp, Mycobacteroides abscessus
  source 1..50: mol_type = genomic DNA
ggggtgcaaaactcatttttcgaccacgcgaatgttggcgtttgatcgcg

SEQ ID NO: 63175 - DNA, 40 bp, Mycobacteroides abscessus
  source 1..40: mol_type = genomic DNA
cggccggaccacggccgggcacgggctcgggaccagcgct

SEQ ID NO: 63176 - protein, 531 aa, Mycobacteroides abscessus; identical to SEQ ID NO: 60791

SEQ ID NO: 63177 - DNA, 50 bp, Mycobacteroides abscessus; identical to SEQ ID NO: 60792
  source 1..50: mol_type = genomic DNA

SEQ ID NO: 63178 - DNA, 40 bp, Mycobacteroides abscessus; identical to SEQ ID NO: 29268
  source 1..40: mol_type = genomic DNA

SEQ ID NO: 63179 - DNA, 50 bp, Mycobacteroides abscessus
  source 1..50: mol_type = genomic DNA
ggagtgtaaagctcaactttcgaccacgcgctggttgaggattacacccc

SEQ ID NO: 63180 - DNA, 40 bp, Mycobacteroides abscessus; identical to SEQ ID NO: 63175
  source 1..40: mol_type = genomic DNA

SEQ ID NO: 63181 - protein, 487 aa, Mycobacteroides abscessus
MKLQAKRALVVIRLSRVTDATTSPERQREACLDLCKQRGYEVVGTAEDLDVSAGKTTPFTRPQLGDWLTNRHNEFDVLVVFRMDRIVRRLLDLADLIRWCQTHSVALVSATEAFLDLTMEFGDVVALLVAKVAEMELAAISERNRSAAQHNMREGKYRGGPPPWGYRPEKIDGDWRFVQDDEQVAVINEVVRRVLDGEPLRQVAADLTDRAVLTPRDRVNQLKGREIKGYSWHSAKLREMLTSKSLLGHAVTASGSIRNDDGSPVIRATPILERDVFEQVQVELAGRENRKEPTKRSSSLLLRVLYCGVCCKPAYKLKGGKGRQDRYRCASAQYKSTCGNGMLLVADANEVLTDAVMFELGDKYRRDRVWDAGSDHSAELSDIDDTLADLTDQLGTGAFRKGTRQRERLDARIADLAERQAQLAAQATRPAGWTWVPTTELFRDWWGSQTIEQQNLWLRQMEVRMTWDHQGPHIDMRQLDKMAEQWE

SEQ ID NO: 63182 - DNA, 50 bp, Mycobacteroides abscessus
  source 1..50: mol_type = genomic DNA
tggtagtaaaactagacagtcgaatagcccacaagctatatttacaacca

SEQ ID NO: 63183 - DNA, 40 bp, Mycobacteroides abscessus; identical to SEQ ID NO: 29268
  source 1..40: mol_type = genomic DNA

SEQ ID NO: 63184 - DNA, 50 bp, Mycobacteroides abscessus
  source 1..50: mol_type = genomic DNA
tggtagtaaaactagacagtcgaacagcccacaagctatatttacaacca

SEQ ID NO: 63185 - DNA, 40 bp, Mycobacteroides abscessus; identical to SEQ ID NO: 63175
  source 1..40: mol_type = genomic DNA

SEQ ID NO: 63186 - protein, 531 aa, Mycobacteroides abscessus
MKPRALVVVRLSRVTDATTSPERQVTACRELCATRGYEVVGVAEDLDVSAGKTTPFDRPQLGRWLADPSQFDVIVFFRVDRIVRRLFDLADLIRWSREHAVTLVSATETHFDLSTDFGDIIALLVAKVAEMELEAISERNASAFRHNIKAGKYRGGMPPWGYVPTRDEDSGDWRLVQDPIQVSVIHDVVERVLKGEPLRAIAHDLTAQGIPTPKDRFAQTQGREASGYEWHSAPLKRALTSPTLLGRVVTREPLLDAQGRIQRDTKGRKVFGPETVVVGDDGSPVIRAEPILSREVFDRVGVELSGRENRKEPTKRSSGLLLRVIYCGECGRPAYRLKGGTGRKARYRCASAQYKDPCPNRTIALDWAESELERRILMNLGPLERKRRVWFPGNDHSDELSEVNELLSDLTDQLGTGTFKRGTPQRVRLDERIQSLTKRQEVLAALPQEPAGWRYEATGELFSDWWESQDTEARNIWLRQMNFRVVWKSHAEGVSTVVDEFKLDGDLTMDLDADQLFGPIVDIARALSNAR

SEQ ID NO: 63187 - DNA, 50 bp, Mycobacteroides abscessus
  source 1..50: mol_type = genomic DNA
agggtgtaaatcggaacattcgactatgcctcagttgaggattacacccc

SEQ ID NO: 63188 - DNA, 40 bp, Mycobacteroides abscessus; identical to SEQ ID NO: 29263
  source 1..40: mol_type = genomic DNA

SEQ ID NO: 63189 - DNA, 50 bp, Mycobacteroides abscessus
  source 1..50: mol_type = genomic DNA
agggtgtaaatcggaacattcgactgtgcctcagttgaggattacacccc

SEQ ID NO: 63190 - DNA, 40 bp, Mycobacteroides abscessus
  source 1..40: mol_type = genomic DNA
agcgctggtcccgagcccgtgcccggccgtggtccggccg

SEQ ID NO: 63191 - protein, 531 aa, Mycobacteroides abscessus; identical to SEQ ID NO: 63186

SEQ ID NO: 63192 - DNA, 50 bp, Mycobacteroides abscessus; identical to SEQ ID NO: 63187
  source 1..50: mol_type = genomic DNA

SEQ ID NO: 63193 - DNA, 40 bp, Mycobacteroides abscessus; identical to SEQ ID NO: 29268
  source 1..40: mol_type = genomic DNA

SEQ ID NO: 63194 - DNA, 50 bp, Mycobacteroides abscessus
  source 1..50: mol_type = genomic DNA
agggtgtaaatcggaacattcgaccatgcctcagttgaggattacacccc

SEQ ID NO: 63195 - DNA, 40 bp, Mycobacteroides abscessus; identical to SEQ ID NO: 63175
  source 1..40: mol_type = genomic DNA

SEQ ID NO: 63196 - protein, 490 aa, Mycobacteroides abscessus
MKGQAKRALVVIRLSRVTDATTSPGRQREACLELCKRRGYEVVGTAEDLDVSAGKTTPFDRPQLGDWLTNRHHEFDVLVVFRMDRIVRRLLDLADLIRWGQNHSVALVSATEAFLDLTAPFGDVIALLVAKVAEMELAAISERNKSAAQHNMRAGKYRGGPPPWGYMPEKIDGEWRFVQDDEQVKVINEVVRRVLYGEPLRQVAADLTDRAVPTPRDRVNQLKGRETKGYSWHSAKLREMLTSKSLLGHAVTGSGSIRKDDGSPVIRATPILERDVFEQVQVELAGRENRKEPTKRSSSLLLRVIFCGVCGRPAYKLKGGKGRQDRYRCASAQYKSTCGNRTIPIADAGEALTDAMMYELGDKYRMDRVWEAGSDHAAELAELEETLSDLTDQLGVGAFRKGTPQRQRLDARIEGLSHRQAELAAQATKPAGWIWVPTDEPFVDWWKSQTVEQLNAWLRSMEVRMTWDHQGTHVEMLHLEKMAEQWDNLS

SEQ ID NO: 63197 - DNA, 50 bp, Mycobacteroides abscessus
  source 1..50: mol_type = genomic DNA
tgcatgtaaaaattgacattggaatattcgatgggctatctttacaacca

SEQ ID NO: 63198 - DNA, 40 bp, Mycobacteroides abscessus; identical to SEQ ID NO: 29268
  source 1..40: mol_type = genomic DNA

SEQ ID NO: 63199 - DNA, 50 bp, Mycobacteroides abscessus
  source 1..50: mol_type = genomic DNA
tgcatgtaaaaattgacattggaacattcgatgggctatctttacaacca

SEQ ID NO: 63200 - DNA, 40 bp, Mycobacteroides abscessus; identical to SEQ ID NO: 63175
  source 1..40: mol_type = genomic DNA

SEQ ID NO: 63201 - protein, 486 aa, Enterocloster bolteae
MPATPLEIGAAYVRVSTDDQTELSPDAQIRVIMDAAKADGFIIPKEYIFIEKKGISGRKADNRPEFQRMIAIAKSQKPAPFKRLYLWKFSRFARNQEESTFYKGILRKKCDVEIKSVSEPIMEGMFGRLIETIIEWFDEYYSINLSGEVLRGMTEKALREGYQATPCLGYRAVGEGKPFAVEEKSYAIVEYIFQTYHSGKDMTATARAANARGYRTRRGNLFDRRGINRILANRFYIGEVIWNGYSFQGTHEVRSSVTSLFDDVQKRIEKEYRPQKRREVSNNVHWLSGLLKCSICGGSLGFNRSNDQKKRPDFFQCWKYAKGMHPGSCCLAVHLAEKAVIESLEEVLETNELEYEYIQKTDDAVNAEEIVIQEALARLEVKERRIREAYENEIDTLEEYKQNKLRLKAEREELMADAERLRRQAEQSPATVPSKEDIMRQIAHVHEILADPNISYEIKGNALRKIVKEIVFDRGKGHLHIHFYIS

SEQ ID NO: 63202 - DNA, 50 bp, Enterocloster bolteae; identical to SEQ ID NO: 61017
  source 1..50: mol_type = genomic DNA

SEQ ID NO: 63203 - DNA, 40 bp, Enterocloster bolteae
  source 1..40: mol_type = genomic DNA
acccatttcgccgtccggcccgccatactgactcattata

SEQ ID NO: 63204 - DNA, 50 bp, Enterocloster bolteae; identical to SEQ ID NO: 61019
  source 1..50: mol_type = genomic DNA

SEQ ID NO: 63205 - DNA, 40 bp, Enterocloster bolteae
  source 1..40: mol_type = genomic DNA
atccattgcaccctccacctggccacacttcctcagcata

SEQ ID NO: 63206 - protein, 556 aa, Rhodanobacter denitrificans
MARAYAYIRWSTAVQGEGDSLTRQTAGLDDFKTSYPKVELVRNYVDEGVSSFSGKNRINGELATMLQDVAKGKIKPGDYIVCESIDRLTREGWEVATDLIRGLLKKGINLYTTFDKRLYVNSRLEDFLMIGLIAERAKNESETKSLRIKEAWKRRTANKEKTLFQSIAPFGLTIVDGQYQINQKEKEEVEELLEVIALSGVNKAISVVNKYSTYQWNKSKVHALLSKKWVLGIHSRTANIYTEVIEKGEVIAKRRRQKIVETIEGFYPQVVKEELFNRAIVSMEARSFQKSGGRRSSNFSNIFAKMIFCHTCHSPLFYQQSKNPNQTNIQFFRIYHCPICIWQMPFDVAFYEFLYFAMLAGLGASREVTESHRGGVGGKLTGILADGKEKQGDDLEKLEEAYYKAVRDEKAVSLQMEELDIFPIPKILIEKVKQVSKQLEITKKAFEGAKAKEVEEEEITIEDLVEKMETEKGRLELSAILQSLGISLFFHFNKEGGTGYLTIYKNHEKIWYRQYQYPKTNRGTRAKDMVEKFGFNIIEVMEGKSTPRLRRPPRGL

SEQ ID NO: 63207 - DNA, 50 bp, Rhodanobacter denitrificans
  source 1..50: mol_type = genomic DNA
accgcgtaaatgggaagtgccatcaagctagccccgccgatttatatgat

SEQ ID NO: 63208 - DNA, 40 bp, Rhodanobacter denitrificans
  source 1..40: mol_type = genomic DNA
tatcgagttcaacgcgatcaacctggcgtgggatgcggtg

SEQ ID NO: 63209 - DNA, 50 bp, Rhodanobacter denitrificans
  source 1..50: mol_type = genomic DNA
accgcgtaaatgggaagtgccatcctgctagccccgccgatttatatgat

SEQ ID NO: 63210 - DNA, 40 bp, Rhodanobacter denitrificans
  source 1..40: mol_type = genomic DNA
tctccatctcatccccatcctcctggtgtgggatgctgga

SEQ ID NO: 63211 - protein, 526 aa, Streptomyces globisporus
MDEDGEPWLAYIRVSTWKEEKISPELQRDAIAQWARRTGRRIIGWIEDLDVSGRHFKRKIMTCIERVEAGEARGVAVWRYSRFGRDRTGNAINLARLQQAGGELESATEPVDATTAIGRFQRGMILEFSAFESDRAGEQWRETHDHRKYKLRLPAQGRKRWGYVWHRRYDAGTGKLQEERYEPDETTGPVCAQLYVDYVNGTGFSALCGKLNRAGHRTTQGTMWSTETLSRYMDSGFPAGLLTVHDPECRCRKTNGTCKKHVFIQGAQEELIEFDLWERYRQRRKEVAATAPRSRVGMYELTSLVKCAGCRQGTSLNTSKREGRNVTGFAYRCSKRAKSGGTACVGILVEREHVEKEVFKWLKKEAAAGIDKAPATKATPEKDRAEAQAANMTARARAQAEVDKQRQALARLRAEHAANPDDFGEGEYEEAADLIRKKRAEAQKLLDSIPDVVPLPHRSEFVPLVVGIVKEWKTFNVAERNMTLRKIIRRVAVTRSGPGVENHDVTVHPLWEPDPWPDPKKKATER

SEQ ID NO: 63212 - DNA, 50 bp, Streptomyces globisporus
  source 1..50: mol_type = genomic DNA
ggaagtgttttggggacgttgatgtgcagcagtggcggtaaaacactcgc

SEQ ID NO: 63213 - DNA, 40 bp, Streptomyces globisporus
  source 1..40: mol_type = genomic DNA
gcgggtcgccacgctcatgtggaacaacgcggaacatgtc

SEQ ID NO: 63214 - DNA, 50 bp, Streptomyces globisporus
  source 1..50: mol_type = genomic DNA
ggaagtgttttggggacgttgatgcacagcagtggcggtaaaacactcgc

SEQ ID NO: 63215 - DNA, 40 bp, Streptomyces globisporus
  source 1..40: mol_type = genomic DNA
gcgcgtggcccagctcatgcacagccaccaggaagaggtc

SEQ ID NO: 63216 - protein, 498 aa, Brevibacterium casei
METTALIYTRASMDRHYLMRATNDQETDCRVWCDQQGWQVGKVITDANRSASQWRTREREGFEEALQLIASKDYDAFVTWEPSRAGRELLAYVQLRAACQEAGVLYLTRGRVYDFERSDDAFMMGLEFLTAEKDAAVIRERQLRTVRLNAKKGRPHGRLPYGYRRVYDERTGALLRQEIDPEKAAIIINAVDEILSGVPMNAIVTRLNKQGVPTPMKPTSDHSRGWMNSSLRQLLKSPTIAGLRKYRGEVIGEADWPAIIPRERWEEVNRVLSDRAVRTRYVEEDNHSHPKWLLSFIAKCGYCSRPLVRLNGVIPRKDGSSRNNYVCPIAGCRKVSIDVGRTDAFVVGALLGWLSEPESMAVIAASDESWSERVGEAEERLAALRQRLDEAAEQYAEGAISLTMLSSIERRLNPQIEQAAKAAVPPVSDAGLLELVRTQDLDAAWEDLVLLERRRLVKMLFDIRIVKARQLGGIFDPQRIKITPRFAVRDSYQWSRSG

SEQ ID NO: 63217 - DNA, 50 bp, Brevibacterium casei
  source 1..50: mol_type = genomic DNA
caatgccctgtcggagtgctcggctcatcgagcactccgatagcagatac

SEQ ID NO: 63218 - DNA, 40 bp, Brevibacterium casei
  source 1..40: mol_type = genomic DNA
gtcgacgtcgttcgtcggctcgtcgaggatgatgacattg

SEQ ID NO: 63219 - DNA, 40 bp, Brevibacterium casei; identical to SEQ ID NO: 63218
  source 1..40: mol_type = genomic DNA

SEQ ID NO: 63220 - DNA, 50 bp, Brevibacterium casei
  source 1..50: mol_type = genomic DNA
ccaggccctacctcactgatctcctcttctagcaattcctcagcacacac

SEQ ID NO: 63221 - protein, 531 aa, Cupriavidus taiwanensis
MRIALYVRVSTDRQAEQGMSMEDQIAACKRWAKEKGHTVVEIFQERGASAFALEKRRPEFDRMIAAALSDAKPFDLIAVHMQSRFYRRNADRELLERQLESKGVHLVTLGQPRPEDETSSFILRNVTGIVDEAQSIASGKRVAECMAASAKAGYFNGARPPYGYKTQATDIPARSGVKKILVINEEEAVIVRRIFALARFGKSAMVMGMKRIAEELNANGILRRGTQWNIRYVEAVLKNSVYYGKLITFRRNSRTGAINPPSKWITTKVPPILPKAVFDEVQGNLAKRRPPNTENRASQVPTLLTGLLICNHCKKGLMLMTGKSGKYKYYRCLSKQKISPDACTCPNFPKAELEKVVLTAVVDRVLTPQRVSHLMGELGELWKDAKKPDAGHLRTLRTRVSALDSSLARIYEELDKEHLDLDSSLQNFIRAKQQARATVIEELRVLDARLHLPFRKFGCDQIESFVGAAKTTLSDPANPIARQFLRAVVTEIRVDAKKCRIRGNRAQLASAISRWKGNEEEVPSDVSDWRA

SEQ ID NO: 63222 - DNA, 50 bp, Cupriavidus taiwanensis
  source 1..50: mol_type = genomic DNA
ccagcgacgtatcagattggcgcgccatacaggacgtggctgggcactgg

SEQ ID NO: 63223 - DNA, 40 bp, Cupriavidus taiwanensis
  source 1..40: mol_type = genomic DNA
tcggaagataattggcgcgcccggctgggatcgaaccagc

SEQ ID NO: 63224 - DNA, 40 bp, Cupriavidus taiwanensis
  source 1..40: mol_type = genomic DNA
tcggaagataattggcgcggccggctgggatcgaaccagc

SEQ ID NO: 63225 - DNA, 50 bp, Cupriavidus taiwanensis
  source 1..50: mol_type = genomic DNA
ccagccccgaagcagggtggtccggcagataggaaggagctgggcactcc

SEQ ID NO: 63226 - protein, 570 aa, Vibrio owensii
MVQAYSYIRWSSKKQSTGDSLERQLDYARKIASEHHLELVEIVDKGVSAFKGKNASDGELGRFIDAVEASRIPSDCWLIVENLDRISRSDVLQANELFTKLLRLGVTIVTGMDSKVYSYDSVIANPMDLMYSIMLFMRANEESKTKSSRTIKNALGMIRKHQEGVRSNDGYPFAIEVVGSHPFFVDTSEGVVKPHPVYFDAARLILTKRADGWGTNRIKKHLDASIPPPLNRRNKTLKTWSHDTIRRLPHTEQILGIRRVTLEGIEYELKDYYPRLVSDDEYQKLQYVLSKRKVNSTSRNHVGLFTGIKVGKCHHCGGTLCVYRASRRDRAVTETLRYACTNKQKGEPCKQRTFAHTQIEDALIRVGMMKLWKPTDNESFDTTELDVKRNHLEDLNQQSSNLATNFALLNPVPQSMVDKMREIQGSIEIVEGEITQLELLQAEHEHKPSSTGIEKVFRELSPSIMDIKNDADRIKVRELIRDAVDTIMLESLDGSQRAGFKMTLNWSDGSIDTVIRKGKAILLDKGHGLSEDDLYQAVDVMSEWDFEMMEERPLNEFKVVSGENSVTHRY

SEQ ID NO: 63227 - DNA, 50 bp, Vibrio owensii
  source 1..50: mol_type = genomic DNA
ggtgcagacaagattgcattaggcccgcctaatgtcttatagtttgaact

SEQ ID NO: 63228 - DNA, 40 bp, Vibrio owensii
  source 1..40: mol_type = genomic DNA
gtcgataagggcattaggcccacccatttcagtacgtacc

SEQ ID NO: 63229 - DNA, 40 bp, Vibrio owensii
  source 1..40: mol_type = genomic DNA
gtcgataagggcattaggctcacccatttcagtacgtacc

SEQ ID NO: 63230 - DNA, 50 bp, Vibrio owensii
  source 1..50: mol_type = genomic DNA
ggtgcatacccgtagtcaggaggctccccttaaatccgggagtttgaggt

SEQ ID NO: 63231 - protein, 560 aa, Rhodococcus pyridinivorans
MTIIDADRTAIDSLVAPTPFPGSFAVSYLRVSTKEQAEKGGQAEGFSIPAQREANQRKADQLGATIIEEFVDAGESARKADRPELMRMIQYVVKHKTNYCIVHKVDRLARNRADDVTIHLALKDAGVTLVSATENIDETPSGMLLHGIMSSIAEFYSRNLATEVVKGLSQKAAQGGTVTKAPIGYRNVGVRDDFGREVRTVEIDEERARLVRWAFQVFASGGWTTSQLHHELVARELTTAASPRRPSRPIGKSSVHRMLTNPYYKGSVRYQGVTYAGAHEAIVPNEVWDQVQTVLGTHRSAADATQVHEHYLKGTVFCGQCGSRLLVCNAKSSQGTIYPYFVCASRHAGRGDCTRQAMLIEQVERLIERFYAKVQIDPETIEAISAMIHARFDEMMAEGAAELADLASRRTQLEGEQQKLLQAHYAGAIPLDLLKREQDRITASLETIEHRITTHHGHYADARANLDDSLKLLSNAADLYEHADDPNRRLCKQALFKAIYIDEDNDVRVGYRNPYDGLSLSGLHADALSWAAEAKKMGQGRTCDQGRTLGRKFTPDPFGV

SEQ ID NO: 63232 - DNA, 50 bp, Rhodococcus pyridinivorans
  source 1..50: mol_type = genomic DNA
aagttcacacctgacccgtttggggtgcctcgcctccacgttcccgacat

SEQ ID NO: 63233 - DNA, 40 bp, Rhodococcus pyridinivorans; identical to SEQ ID NO: 57178
  source 1..40: mol_type = genomic DNA

SEQ ID NO: 63234 - DNA, 40 bp, Rhodococcus pyridinivorans
  source 1..40: mol_type = genomic DNA
atcgggggttctcttcgggaggagtgacgggactcgaacc

SEQ ID NO: 63235 - DNA, 50 bp, Rhodococcus pyridinivorans
  source 1..50: mol_type = genomic DNA
caatcccaatgtcacccttctgggaggcctcccctcgtgtgtcagggcat

SEQ ID NO: 63236 - protein, 405 aa, Anaerotignum lactatifermentans
MSRKKQVNQKITALYCRISLDDGGDNESMSISNQKLMLKEFAEKNGMFQYEYYVDDGYTGRNFNRPAFQRMIADIEAGKIGCVITKDLSRLGRNYIEAGSYIEIFFPKHNVRYIAITDGVDSLTRQEMDITPFKNILNDMYSRDISKKVLAGRMTRSRQGKFCGGQPPLGLMRDPEDRGHLILDPETAPVIRKIYDLALDGWGCMRIAKQLMEDKVPITRVKGNTSCDVNYYAWGGARISHILRNPFYKGAHLVCRTHQKGIRSNTYDIIPREDWEIIEDCHEAIVTPEEWEQVQAIVDRRPPIMKGNACPFYNLFHGIIYCATCGKSMQVRYEKVGRTGKNRFTGEMREPIDKAYYICQTYNRLGKNACTSHKIEARDLYNLVLKDIQELAAMALKDADAFYQR

SEQ ID NO: 63237 - DNA, 50 bp, Anaerotignum lactatifermentans
  source 1..50: mol_type = genomic DNA
aagatgcagatgccttttatcaacggtagtgcggtcggtgacatgggcct

SEQ ID NO: 63238 - DNA, 40 bp, Anaerotignum lactatifermentans
  source 1..40: mol_type = genomic DNA
aagatggctgcggatcggcggttgagcagccggatggagc

SEQ ID NO: 63239 - DNA, 40 bp, Anaerotignum lactatifermentans
  source 1..40: mol_type = genomic DNA
aagatggctgcggatcggcatttgagcagccggatggagc

SEQ ID NO: 63240 - DNA, 50 bp, Anaerotignum lactatifermentans
  source 1..50: mol_type = genomic DNA
gagatgcatagatattatgagaacattagagaagtccacaccaggggtct

SEQ ID NO: 63241 - protein, 507 aa, Aeromonas rivipollensis
MDRTEQTADKSIAYSYIRLSSRQQISGDGQRRQIEAAELYCKQNNLTLSPKSFRDLGISAYKEIDRPSLSDLHECIANGSIRAGDVVIIEKLDRLSRQGIDTTTEMLKSILRQGVIVVSLMDGLRLDRNSLNDLTLVIRIAIAADLANKESSAKSIRIQANKDSVRDKIKAGEPVPMKLPFWLKLEGNKFTFDDRRYILDIILERKRQGESLAKIAGHLNSSNIPSPTVKGVWNPSTLRDVIANPILFGAYQLTVKINGKYQPTELVQGYFPAVITYSEFLELNSKAMQRPAGASETNHISGLVFCGCCGKRMAAKSRKNKTAKVTYYYCRYSLIEKCEHTAHVRDLHNVVISNIHHLEVKQLNKQDSGEDALRIKLAQVEKRISDLSSELSNVESTLPISAVMASLTSLEKQKKELMADIKAVVRIAPDAIETLLEHIDDPKKFNIEIKKIVESIVVKPFGNGHIVKISRFDKHSISFHTKSIFKASDSEKFSKMVNEIADSLEEE

SEQ ID NO: 63242 - DNA, 50 bp, Aeromonas rivipollensis
  source 1..50: mol_type = genomic DNA
ttatgtgcttttaagcgttatcgcaaggtgttacaatcaaaggcacacac

SEQ ID NO: 63243 - DNA, 40 bp, Aeromonas rivipollensis
  source 1..40: mol_type = genomic DNA
ctgcgaaacccgttatcgcaagggattccacgcccacgaa

SEQ ID NO: 63244 - DNA, 40 bp, Aeromonas rivipollensis
  source 1..40: mol_type = genomic DNA
ctgcgaaacccgttatcgccagggattccacgcccacgaa

SEQ ID NO: 63245 - DNA, 50 bp, Aeromonas rivipollensis
  source 1..50: mol_type = genomic DNA
agatgagttccaaggcctcatggccaggtgttataaggtttggcatccag

SEQ ID NO: 63246 - protein, 548 aa, Blautia marasmi
MNREGKKCVLYPRVSTEMQVDGYSLEGQKNNLKRFADREEMEIVGIYEDAGKSGKSIEGRPAFKKMLSDIKNGLEIEYILVYKLSRFGRNAADILNSLEFVQSYGINLICIEEGIDSSQTSGKLLISVLSAVAEIERENIIEQTMNGRREKARQGGWNGGFAPYGYYLKDNQLLIEETEAEAIRIIFEKFGNSDIGLGGVAKYLNLQGIKKIPRQNGKLETWSSHLIRQILDNPVYCGKIAYGRRTREKVKGTKNEYKQVHTDDYILEDGQHEGIVSEELWQKVYAKRKATGIKQPSKVGKDRAHLLTGVLKCPICGSSMYTNKHAWTNKDGTYKEVYYYICGRNKQERGHHCDYKASLRKTDIEPLVVEAVKELVSDVYFAKEIEKRIGVQTDTSTVDKELANYENKLKEVDLNKARLENEIDNLPADARYRERKIHDMTLRLDALYDTMVELEERIEDAKLRKSSIEMEAITLDNVYKIMQNFGKLYAIMSDEEKKSLITYLIKEIQIYPNGESEMPLKSIEFNFPIYIDGKEVRRVLWKSGNTVE

SEQ ID NO: 63247 - DNA, 50 bp, Blautia marasmi
  source 1..50: mol_type = genomic DNA
ttgtggaaatctggtaataccgttgagacaatctgcctacttgtccgtaa

SEQ ID NO: 63248 - DNA, 40 bp, Blautia marasmi
  source 1..40: mol_type = genomic DNA
cgcttggacggagcacgtggagacggtagtacggatgaca

SEQ ID NO: 63249 - DNA, 40 bp, Blautia marasmi
  source 1..40: mol_type = genomic DNA
cgcttggacggagcacgtgaagacggtagtacggatgaca

SEQ ID NO: 63250 - DNA, 50 bp, Blautia marasmi
  source 1..50: mol_type = genomic DNA
tttttgaacacaggtaatacagttaataataactgctctaatgtcattat

SEQ ID NO: 63251 - protein, 568 aa, Ruminococcus champanellensis
MEDTRKIAIYSRKSKFTGKGESIGNQIELCKAGIRTAYSDISDDAILIFEDEGFSGGNTNRPQFQEMMKLCRKRKIKCIVCYRLDRISRNICDYTSMIEELNQLDISFISITEKFDTTSAIGRTMMNIASVFAQFERETIAERIRDNMLELAKDGRWLGGNTPTGYRSVETIGSITMDGRKRKARKLEIIPDEAKLIQLIFSKFLEFHSLTKTETYLIQNNYITKTGKYFSRFAIKGILMNPIYLKADEAAWNYFDTKEVEVFSDRNCFDGNHGVIAYNKTKQQTGHSNKVRDIKDWIIAVGKHEGIISGEDWCQTQKLLAQNKSKSYRKPRSNVALLSGLLFCGDCGSFMRPKLSQRINQDGEFIYDYLCELKEKSKRQKCSMKRINGNELDQAISNEIKKITSDESELLRILKKEAAHAQMRNTSHQKKILSLKRNKSYTECKIKNLIALLEKAEDTAAHKYILEEINTLDKAKIDIEAQIQEYEGMERVNALSDLEFEGLAKMLCSFADSFETMPLEQKRFTIKTFVRKIVWDGSQVHIYFLGNEDDKTDISQDALLEPQREGYK

SEQ ID NO: 63252 - DNA, 50 bp, Ruminococcus champanellensis
  source 1..50: mol_type = genomic DNA
tagagccgcagcgagagggttacaaaagcaaccgtatcattacggctcta

SEQ ID NO: 63253 - DNA, 40 bp, Ruminococcus champanellensis
  source 1..40: mol_type = genomic DNA
tgcggggcggtgtattgaaaatgaaatcctcatgcacttc

SEQ ID NO: 63254 - DNA, 40 bp, Ruminococcus champanellensis
  source 1..40: mol_type = genomic DNA
tgcggggcggtgtattgaatctgaaatcctcatgcacttc

SEQ ID NO: 63255 - DNA, 50 bp, Ruminococcus champanellensis
  source 1..50: mol_type = genomic DNA
tagagcagctagggaagggtttcctcagtatcctcagccccacagctgtg

SEQ ID NO: 63256 - protein, 458 aa, Staphylococcus epidermidis
MNYERSYLRSCQVSTLEQKEHGYSIEEQERKLKSFCEINDWSVSDVFIDAGFSGAKRDRPELQRMMNDIKRFDLVLVYKLDRLTRNVRDLLDLLEVFEQNNVAFRSATEVYDTSTAMGRLFVTLVGAMAEWERETIRERVMMGKRAAIKQGMILTPPPFYYDRVDNTYIPNDYKKVVLWAYDEVMKGNSSKAIARKLNDSDIPPPNGKRWEDRTITRALRSPITRGHYTWGDVFIENSHEPIITEEMYQQIKERLEERINTKIVSHVSVFRGKFICPRCGGTLTLNTVTRKRKKGYVTYKTYYCNTCKAKKESFGFSENEALRVFRDYLSKLDLEKYEVKTKQKDDVVTIDIDKVMEQRKRYHKLYAKGLMQEEELFELIKETDETIAEYEKQKELVPRKSLDIDKIKKFKNALLESWEIFSLEDKADFIKMAIKSIDIKYVKLKNRHSIKISDIEFY

SEQ ID NO: 63257 - DNA, 50 bp, Staphylococcus epidermidis; identical to SEQ ID NO: 51572
  source 1..50: mol_type = genomic DNA

SEQ ID NO: 63258 - DNA, 40 bp, Staphylococcus epidermidis; identical to SEQ ID NO: 26028
  source 1..40: mol_type = genomic DNA

SEQ ID NO: 63259 - DNA, 40 bp, Staphylococcus epidermidis; identical to SEQ ID NO: 52369
  source 1..40: mol_type = genomic DNA

SEQ ID NO: 63260 - DNA, 50 bp, Staphylococcus epidermidis; identical to SEQ ID NO: 52370
  source 1..50: mol_type = genomic DNA

SEQ ID NO: 63261 - protein, 458 aa, Staphylococcus epidermidis; identical to SEQ ID NO: 51591

SEQ ID NO: 63262 - DNA, 50 bp, Staphylococcus epidermidis; identical to SEQ ID NO: 51572
  source 1..50: mol_type = genomic DNA

SEQ ID NO: 63263 - DNA, 40 bp, Staphylococcus epidermidis; identical to SEQ ID NO: 26028
  source 1..40: mol_type = genomic DNA

SEQ ID NO: 63264 - DNA, 40 bp, Staphylococcus epidermidis; identical to SEQ ID NO: 52369
  source 1..40: mol_type = genomic DNA

SEQ ID NO: 63265 - DNA, 50 bp, Staphylococcus epidermidis; identical to SEQ ID NO: 52370
  source 1..50: mol_type = genomic DNA

SEQ ID NO: 63266 - protein, 458 aa, Staphylococcus epidermidis
MNYERSYLRSCQVSTLEQKEHGYSIEEQERKLKSFCEINDWSVSDVFIDAGFSGAKRERPELQRMMNDIKRFDLVLVYKLDRLTRNVRDLLDLLEVFEQNNVAFRSATEVYDTSTAMGRLFVTLVGAMAEWERETIRERVMMGKRAAIKQGMILTPPPFYYDRVDNTYIPNDYKKVVLWAYEEVMKGVSSKAIARKLNDSDIPPPNGKRWEDRTITRALRSPITRGHYTWGDVFIENSHEPIITEEMYQQIKERLEERINTKIVSHVSVFRGKFICPRCGGTLTLNTVTRKRKKGYVTYKTYYCNTCKAKKQSFGFSENEALRVFRDYLSKLDLDKYEVKTNQKDDVVTIDIDKIMEQRKRYHKLYAKGLMQEEELFELIKETDETIAEYEKQKELVPSKTLDVDKIKKFKNALLESWEIFSLEDKADFIKMAIKSIDIDYVKLKNRHSIEIKDIEFY

SEQ ID NO: 63267 - DNA, 50 bp, Staphylococcus epidermidis; identical to SEQ ID NO: 51572
  source 1..50: mol_type = genomic DNA

SEQ ID NO: 63268 - DNA, 40 bp, Staphylococcus epidermidis; identical to SEQ ID NO: 26028
  source 1..40: mol_type = genomic DNA

SEQ ID NO: 63269 - DNA, 40 bp, Staphylococcus epidermidis; identical to SEQ ID NO: 52369
  source 1..40: mol_type = genomic DNA

SEQ ID NO: 63270 - DNA, 50 bp, Staphylococcus epidermidis; identical to SEQ ID NO: 52370
  source 1..50: mol_type = genomic DNA

SEQ ID NO: 63271 - protein, 458 aa, Staphylococcus epidermidis; identical to SEQ ID NO: 51616

SEQ ID NO: 63272 - DNA, 50 bp, Staphylococcus epidermidis; identical to SEQ ID NO: 51572
  source 1..50: mol_type = genomic DNA

SEQ ID NO: 63273 - DNA, 40 bp, Staphylococcus epidermidis; identical to SEQ ID NO: 26028
  source 1..40: mol_type = genomic DNA

SEQ ID NO: 63274 - DNA, 40 bp, Staphylococcus epidermidis; identical to SEQ ID NO: 52369
  source 1..40: mol_type = genomic DNA

SEQ ID NO: 63275 - DNA, 50 bp, Staphylococcus epidermidis; identical to SEQ ID NO: 52370
  source 1..50: mol_type = genomic DNA

SEQ ID NO: 63276 - protein, 458 aa, Staphylococcus epidermidis
MNYERSYLRSCQVSTLEQKEHGYSIEEQERKLKSFCEINDWSVSDVFIDAGFSGAKRDRPELQRMMNDIKRFDLVLVYKLDRLTRNVRDLLDLLEVFEQNNVAFRSATEVYDTSTAMGRLFVTLVGAMAEWERETIRERVMMGKRAAIKQGMILTPPPFYYNRVDNTYIPNDYKKVVLWAYDEVMKGNSSKAIARKLNDSDIPPPNGKRWEDRTITRALRNPITRGHYTWGDVFIENSHEPIITEEMYQQIKERLEERINTKIVSHVSVFRGKFICPRCGGTLTMNTATRKRKKGYVTYKTYYCNTCKTKKQSFGFSENEALRVFRDYLSKLDLDKYEVKTKQKDDVVTIDIDKIMEQRKRYHKLYAKGLMQEEELFELIKETDETIAEYEKQKELVPRKSLDIDKIKKFKNALLESWKIFSLEDKADFIKMAIKSIDIDYVKLKNRHSIKINDIEFY

SEQ ID NO: 63277 - DNA, 50 bp, Staphylococcus epidermidis; identical to SEQ ID NO: 51572
  source 1..50: mol_type = genomic DNA

SEQ ID NO: 63278 - DNA, 40 bp, Staphylococcus epidermidis; identical to SEQ ID NO: 26028
  source 1..40: mol_type = genomic DNA

SEQ ID NO: 63279 - DNA, 40 bp, Staphylococcus epidermidis; identical to SEQ ID NO: 52369
  source 1..40: mol_type = genomic DNA

SEQ ID NO: 63280 - DNA, 50 bp, Staphylococcus epidermidis; identical to SEQ ID NO: 52370
  source 1..50: mol_type = genomic DNA

SEQ ID NO: 63281 - protein, 458 aa, Staphylococcus epidermidis
MNYERSYLRSCQVSTLEQKEHGYSIEEQERKLKSFCEINDWSVSDVFIDAGFSGAKRERPELQRMMNDIKRFDLVLVYKLDRLTRNVRDLLDLLEVFEQNNVAFRSATEVYDTSTAMGRLFVTLVGAMAEWERETIRERVMMGKRAAIKQGMILTPPPFYYDRVDNTYIPNNYKKVVLWAYDEVLKGVSSKGIARKLNDSDIPPPNGKRWEDRTITRALRSPITRGHYTWGDVFIENSHEPIITEEMYQQIKERLEERINTKIVSHVSVFRGKFICPRCGGTLTLNTVTRKRKKGYVTYKTYYCNTCKTKKQSFGFSENEALRVFRDYLSKLDLDKYEVKTNQKDDVVTIDIDKIMEQRKRYHKLYAKGLMQEEELFELIKETDETIAEYEKQKELVPRKSLDIDKIKKFKNALLESWKIFSLEDKADFIKMAIKSIDIDYVKLKNRHSIKINDIEFY

SEQ ID NO: 63282 - DNA, 50 bp, Staphylococcus epidermidis; identical to SEQ ID NO: 51572
  source 1..50: mol_type = genomic DNA

SEQ ID NO: 63283 - DNA, 40 bp, Staphylococcus epidermidis; identical to SEQ ID NO: 26028
  source 1..40: mol_type = genomic DNA

SEQ ID NO: 63284 - DNA, 40 bp, Staphylococcus epidermidis; identical to SEQ ID NO: 52369
  source 1..40: mol_type = genomic DNA

SEQ ID NO: 63285 - DNA, 50 bp, Staphylococcus epidermidis; identical to SEQ ID NO: 52370
  source 1..50: mol_type = genomic DNA

SEQ ID NO: 63286 - protein, 458 aa, Staphylococcus epidermidis
MNYERSYLRSCQVSTLEQKEHGYSIEEQERKLKSFCEINDWSVSDVFIDAGFSGAKRERPELQRMMNDIKRFDLVLVYKLDRLTRNVRDLLDLLEVFEQNNVAFRSATEVYDTSTAMGRLFVTLVGAMAEWERETIRERVMMGKRAAIKQGMILTPPPFYYDRVDNTYIPNDYKKVVLWAYDEVMKGNSSKAIARKLNDSDIPPPNGKRWEDRTITRALRNPITRGHYTWGDVFIENSHEPIITEEMYQQIKERLEERINTKIVSHVSVFRGKFICPRCGGTLTMNTATRKRKKGYVTYKTYYCNTCKTKKQSFGFSENEALRVFRDYLSKLDLDKYEVKTKQKDDVVTIDIDKIMEQRKRYHKLYAKGLMQEEELFELIKETDETIAEYEKQKELVPRKSLDIDKIKKFKNALLESWKIFSLEDKADFIKMAIKSIDIDYVKLKNRHSIKINDIEFY

SEQ ID NO: 63287 - DNA, 50 bp, Staphylococcus epidermidis; identical to SEQ ID NO: 51572
  source 1..50: mol_type = genomic DNA

SEQ ID NO: 63288 - DNA, 40 bp, Staphylococcus epidermidis; identical to SEQ ID NO: 26028
  source 1..40: mol_type = genomic DNA

SEQ ID NO: 63289 - DNA, 40 bp, Staphylococcus epidermidis; identical to SEQ ID NO: 52369
  source 1..40: mol_type = genomic DNA

SEQ ID NO: 63290 - DNA, 50 bp, Staphylococcus epidermidis; identical to SEQ ID NO: 52370
  source 1..50: mol_type = genomic DNA

SEQ ID NO: 63291 - protein, 561 aa, Mycolicibacterium rutilum
MRALIVVRLSRVTDATTSPERQLQACRELCAQRGYEVVGIAEDLDVTAATAPFDRPQLGDWLTNRLGEFDVLVFYRMDRIVRRLLDLADLIRYCQEHAVSVVSATETFLDLTAPFGDIIALLVAKVAEMELAAISDRNASAARYNIRAGKYRGGIPPWGYLPQQTEEGWRYVQDPEQAEVIREVVERVLTGEPLRSIAHGLSERGVLTPKDRFAQSQGREVKGYEWHSGPLKRSLTSPTLLGQVVAREPLTDAQGRIQRDAKGKKTFGPEAVVRNDDGSPVVRCEPILTREVFDRLGVELADRENRKEPTKRSSGLLLQVIYCGVCGRPAYRLKGGAGRKPRYRCASAQYRNPCGNRSVPMEYADETVESVLLGLLGESERLERLWDKGSDHSAELAEINDALADLTSLLGTGPYRAGTPQRIKLNERIQALAARQGELSSETVRPSGWSWQPTGEKFADWWDRQDVTARNVWLRSMGVRLDFTYSVGASQPSMNLVPGDLETLTQELQASGPAVALRETFEGMKESGIAGMELLEGKVVMHFIDGRTHEFEHVLGVPVSE

SEQ ID NO: 63292 - DNA, 50 bp, Mycolicibacterium rutilum
  source 1..50: mol_type = genomic DNA
ttggtgtaatctaaaaccgccgagtactcgaaagttccggtttacaccgt

SEQ ID NO: 63293 - DNA, 40 bp, Mycolicibacterium rutilum
  source 1..40: mol_type = genomic DNA
tgcgatcgtgccgatcgcatactcgacggtcgacatgccg

SEQ ID NO: 63294 - DNA, 40 bp, Mycolicibacterium rutilum
  source 1..40: mol_type = genomic DNA
tgcgatcgtgccgatcgcaggctcgacggtcgacatgccg

SEQ ID NO: 63295 - DNA, 50 bp, Mycolicibacterium rutilum
  source 1..50: mol_type = genomic DNA
tttttttaaattacataagccaagggctctaaagttatggtttccatagt

SEQ ID NO: 63296 - protein, 484 aa, Eubacterium sp ER2
MKGVIYARYSSDNQREESIEGQLRECKDYAERNGITILGTYIDRALSAKTDNRPEFQKMIKDSAKGLFDVVLVWKLDRFARNRYDSARYKNLLKKNGVKVISARENISEGSEGIILEAMLEGYAEYYSAELSEKVIRGLTDNALKCKYNGGTVPMGYYIDDQQYYQIDPKTAPVVLEMFTKYSEGATMQELVNLLNSRGMRSIRGGKITLNIMNHLLKNRRYIGEYSYRDVVKEDGIPSIVPKELFERVQERLAKNKKAPARHKAEDDYLLTTKLYCGKCGSFMVGESGTSHTMKVHRYYRCVNTKKKKLCDKKAVKKDLIEDLVVSYTMKAIMNDEVMERLIDTLMELQKRESTDLPLLKKQLAETEKGINNMLNAIQAGIFTPSTKQRLDELEETKSQLEVSILQEEMHKPLLTREQIAFFIYRFRKFDVTKREQRQRLIDSFVNAVYLYEDKIILTFNYKDGSKTITLAEVEGSDLSVLGA

SEQ ID NO: 63297 - DNA, 50 bp, Eubacterium sp ER2
  source 1..50: mol_type = genomic DNA
ggttcggatttatccgtactcggtgcaccagaccatgataatccgaaccc

SEQ ID NO: 63298 - DNA, 40 bp, Eubacterium sp ER2
  source 1..40: mol_type = genomic DNA
ggttcgagtcccatcagcggcaggaaaaaagctcttcagc

SEQ ID NO: 63299 - DNA, 40 bp, Eubacterium sp ER2
  source 1..40: mol_type = genomic DNA
ggttcgagtcccatcagcgccaggaaaaaagctcttcagc

SEQ ID NO: 63300 - DNA, 50 bp, Eubacterium sp ER2
  source 1..50: mol_type = genomic DNA
agttcggatccttccagacttgttccaccacagcatactttccccgagcc

SEQ ID NO: 63301 - protein, 550 aa, Burkholderia gladioli; identical to SEQ ID NO: 38851

SEQ ID NO: 63302 - DNA, 50 bp, Burkholderia gladioli
  source 1..50: mol_type = genomic DNA
gtgatttatattgagtaccctatgggcagccgagcgatactatacctatc

SEQ ID NO: 63303 - DNA, 40 bp, Burkholderia gladioli
  source 1..40: mol_type = genomic DNA
gagtcgaccagggccttcgggcagccgagcgatacgaacc

SEQ ID NO: 63304 - DNA, 40 bp, Burkholderia gladioli
  source 1..40: mol_type = genomic DNA
gagtcgaccagggccttcgtccagccgagcgatacgaacc

SEQ ID NO: 63305 - DNA, 50 bp, Burkholderia gladioli
  source 1..50: mol_type = genomic DNA
gtgagatagaaggtttaccctagatcctgtagggcatctatatacctatc

SEQ ID NO: 63306 - protein, 472 aa, Mycobacteroides abscessus; identical to SEQ ID NO: 60906

SEQ ID NO: 63307 - DNA, 50 bp, Mycobacteroides abscessus; identical to SEQ ID NO: 60897
  source 1..50: mol_type = genomic DNA

SEQ ID NO: 63308 - DNA, 40 bp, Mycobacteroides abscessus
  source 1..40: mol_type = genomic DNA
cggcgtgatcacctacgacttggcgtgcgccgtacagatg

SEQ ID NO: 63309 - DNA, 40 bp, Mycobacteroides abscessus
  source 1..40: mol_type = genomic DNA
cggcgtgatcacctacgacctggcgtgcgccgtacagatg

SEQ ID NO: 63310 - DNA, 50 bp, Mycobacteroides abscessus
  source 1..50: mol_type = genomic DNA
catttagaagaaaatatataagacctctgatttggaaatattttttggcc

SEQ ID NO: 63311 - protein, 589 aa, Klebsiella oxytoca; identical to SEQ ID NO: 47751

SEQ ID NO: 63312 - DNA, 50 bp, Klebsiella oxytoca; identical to SEQ ID NO: 45382
  source 1..50: mol_type = genomic DNA

SEQ ID NO: 63313 - DNA, 40 bp, Klebsiella oxytoca; identical to SEQ ID NO: 52733
  source 1..40: mol_type = genomic DNA

SEQ ID NO: 63314 - DNA, 40 bp, Klebsiella oxytoca
  source 1..40: mol_type = genomic DNA
cctcggcgtgacaatcggccacaccgacggcaacgttatc

SEQ ID NO: 63315 - DNA, 50 bp, Klebsiella oxytoca
  source 1..50: mol_type = genomic DNA
gataatatgtgtacaacttcagtgcagaattagggaaaaaccaatgcatt

SEQ ID NO: 63316 - protein, 589 aa, Klebsiella oxytoca; identical to SEQ ID NO: 62361

SEQ ID NO: 63317 - DNA, 50 bp, Klebsiella oxytoca; identical to SEQ ID NO: 45382
  source 1..50: mol_type = genomic DNA

SEQ ID NO: 63318 - DNA, 40 bp, Klebsiella oxytoca; identical to SEQ ID NO: 52733
  source 1..40: mol_type = genomic DNA

SEQ ID NO: 63319 - DNA, 40 bp, Klebsiella oxytoca; identical to SEQ ID NO: 63314
  source 1..40: mol_type = genomic DNA

SEQ ID NO: 63320 - DNA, 50 bp, Klebsiella oxytoca; identical to SEQ ID NO: 63315
  source 1..50: mol_type = genomic DNA

SEQ ID NO: 63321 - protein, 552 aa, Streptococcus pneumoniae
MSKEKIKVYLYTRVSTSIQIDGYSLEAQKSRMKAFALYNDYEIVGEYEDAGKSGKSIEGRVQFTRMMEDIKSGKDGVSFVLVFKLSRFARNAADVLSTLQTMQDFGVNLICVEDGIDSSKDAGKLMISVLSAVAEIERENIRVQTMEGRIQKAREGKWNGGFAPYGYQLVDGKLFINEEEAVAIRTIFNQYVNTTIGANGLSKYLENHGIRKIPRQNGKNPLFDAGLIRKILKNPVYNGKIAFGRRTLEKVHGTRNEYKQVEQDEYLIAEGIHEAIISDELWQSAQVKLKSQAKKYEHVNKGKDTRTHLLSGIVKCPICGVGMFGNKCIKKKKDGTKYKDFYYYGCKHRHMIRGHKCTYNKQIREELLDDAVAEVIIKIVSNPKFASMMQEKINMKVDTSEIEKEIDNYQKELRKSHSTKFKLIEEIDNLDADDKHYKRRKQDLDDRLYRMYDKIEDLESLLIDAKAKKQTIEAEKLTGDNIYKILIYFDKLYKVMNDVERRQLITALISEIQIYEEKQPNGQWLKSITFKLPIIDEDLNIGLDNNEHVEAV

SEQ ID NO: 63322 - DNA, 50 bp, Streptococcus pneumoniae
  source 1..50: mol_type = genomic DNA
ggtttggacaataatgagcatgtggagacggtagcgttattgtccaaact

SEQ ID NO: 63323 - DNA, 40 bp, Streptococcus pneumoniae
  source 1..40: mol_type = genomic DNA
cccactgacgcatcacgctgaggcggtatcactgcttgta

SEQ ID NO: 63324 - DNA, 40 bp, Streptococcus pneumoniae
  source 1..40: mol_type = genomic DNA
cccactgacgcatcacgctagggcggtatcactgcttgta

SEQ ID NO: 63325 - DNA, 50 bp, Streptococcus pneumoniae
  source 1..50: mol_type = genomic DNA
ggtctgttccattctgggtattggagaacagtatcggcagggtccatact

SEQ ID NO: 63326 - protein, 506 aa, Alkalihalobacillus hwajinpoensis
MRCAVYVRVSTDKEEQKASLLNQKNLFAKYVSENNWDIHQFYVDVESGTTDKREQLQQLIADAKAKKFDVILAKELSRLARNGGLSYQIRDIAQQHKIHIITLDNAINTLEGNSHMFGIYAWMYEEESQRTSNRVKTSLKTRAEQGLFKGSNAPYGYNLTGSKLYIRNDYTPAIVRRIYNDYIFGKGFDRIAKELYNEGLPTPAQLASKKNASDKWQGSSIRVILTNPHYTGDLVQGRTTTRSVTNKMRDQKSPKDYIIIPNTHEAIISKRDFETVQQLIKSRKKTRPQVEKHLFTNTAYCADCGRGMHYKSNCKGYMCGNYNKHGIKACTDHLVRETDLQLVILNDIKNLIDSIHDKAIVKSLDSKLKKQRQIALKNIDSQTKEIEALNMRKKKTLSLLVDEVISKEAYDDFIKDINESINKLVTNQNQSKISLESTDNKIAINEIKQALEEFIDLKELTPEILHRLIDRIEIKADGSPRIFYRFSNPSAYSLLRSINAQHSTCV

SEQ ID NO: 63327 - DNA, 50 bp, Alkalihalobacillus hwajinpoensis
  source 1..50: mol_type = genomic DNA
tctatcaacgcacagcattcaacgtgcgtggagtactgaaggtagataag

SEQ ID NO: 63328 - DNA, 40 bp, Alkalihalobacillus hwajinpoensis
  source 1..40: mol_type = genomic DNA
tacggctacgcactcgacgtgcgtcgtatgcgggaacata

SEQ ID NO: 63329 - DNA, 40 bp, Alkalihalobacillus hwajinpoensis
  source 1..40: mol_type = genomic DNA
tacggctacgcactcgacgcgcgtcgtatgcgggaacata

SEQ ID NO: 63330 - DNA, 50 bp, Alkalihalobacillus hwajinpoensis
  source 1..50: mol_type = genomic DNA
tatttccaaattatgtatttaacacgggtctagtacctagagtatataag

SEQ ID NO: 63331 - protein, 491 aa, Corynebacterium striatum; identical to SEQ ID NO: 60726

SEQ ID NO: 63332 - DNA, 50 bp, Corynebacterium striatum
  source 1..50: mol_type = genomic DNA
cgtacctataacccaggttctggtaatcctgaatgtggatttgggctaca

SEQ ID NO: 63333 - DNA, 40 bp, Corynebacterium striatum
  source 1..40: mol_type = genomic DNA
tggggctaccggcagcggaaagagcgaattgctgcgaaca

SEQ ID NO: 63334 - DNA, 40 bp, Corynebacterium striatum
  source 1..40: mol_type = genomic DNA
tggggctaccggcagcggagagagcgaattgctgcgaaca

SEQ ID NO: 63335 - DNA, 50 bp, Corynebacterium striatum
  source 1..50: mol_type = genomic DNA
catgcttctgtggctgctgctgctgatcctgagtgagtagatgggctata

SEQ ID NO: 63336 - protein, 480 aa, Micromonospora tulbaghiae
MPRRRGLSAAPTGTRRYVAYRRVSELMGRGGDDFHSPDIQLAAIHRMAKPAGLEEVGPPVDDIDRTGRDFSRDGIDQVRRMAAAGQIDVLAVYKVDRFGRNVLESLQLLAELAAQGVTIMSATEQIDTSTPSGRWMLTNLLAIAEMQSDEIGRGWSNTIARRAEKGHHHGRPLGYLRVNKRLMPAPTLGPAITELFRRYAAGDPIGEVTEYLAAIRGKTMHTANVKKLLRNRAYLGHVVTGDDVLPGEHEPLTDEVTWRRVQARLAAEAGTPPRHLAPTWSLVGLVECPQGHKLQRQGDRLVCGHGRGDVKGGTCPGVGRPVLARVEAEVLRQVAAWAAELRTDHHARARRLARLAVARVDRATLERQMTDARAGMVNLVKERALRRVPEPVYRQALAELRASEQAAASQLARLGPAIREPDPEAAAGAADSLLALWGDAEVTHAERVRALRSIVGRIVVRSAARWREPEHDRVDVQFYL

SEQ ID NO: 63337 - DNA, 50 bp, Micromonospora tulbaghiae
  source 1..50: mol_type = genomic DNA
tctagtggtttgcggtgtcccaccatactcagagatcggtaaccaccacc

SEQ ID NO: 63338 - DNA, 40 bp, Micromonospora tulbaghiae
  source 1..40: mol_type = genomic DNA
ggtcagcacgttgccgacgatcgtcacgtacgtatcgaac

SEQ ID NO: 63339 - DNA, 40 bp, Micromonospora tulbaghiae
  source 1..40: mol_type = genomic DNA
ggtcagcacgttgccgacgcccgtcacgtacgtatcgaac

SEQ ID NO: 63340 - DNA, 50 bp, Micromonospora tulbaghiae
  source 1..50: mol_type = genomic DNA
actagaagtcttgattgtctcctccctctcagtcttgacccaccaccacc

SEQ ID NO: 63341 - protein, 555 aa, Bittarella massiliensis
MRSTENTNRNLITALYCRLSQEDERLGESLSIENQRLMLKKYAEEHRFPNIQFYVDDGFSGADFNRPAFKRMMYEVECGRVGIVIVKDQSRLGRDYLQTGMLMEITFPQYDVRFIAVNDGVDSANGVSDFSGIKNYFNDFYARDTSRKIRAVQKAKGERGERVGTTIPYGYMKNPDNPKQYVPNPETAPIVKRIFEMYASGIGIVKICDRLSREQIVSPSVYAFKTTGSKSGNPDLTRPYHWAQTTVRKMLANQEYVGDTVNFKTYSKSNKLKKRLKNDPENILIFENTHEAIIDRKTFELVQKHFAGRKRPDKQGEMDKYAGYLFCGECGSRLYLHRGKTIKPENNNFQCGGFQRRTSDCTVHYIRENVLDQIILHNLKTVTAFAREHPEGFYAMATQNGEAEAKKFYKTAEREKVQIEKRIKELDNIIRCLYEDRVCGRLTPERYDVMANGYEQEQAELQQELTSITERINKLDMREKCIQEFMDKAKEYLEMPNLTPELLRVFIRRIEVYEKPEKYSRTAGNPIIIHYAFQLPEQNGMPAIEVLARPTTKTA

SEQ ID NO: 63342 - DNA, 50 bp, Bittarella massiliensis
  source 1..50: mol_type = genomic DNA
aatctccgctaagaacatctcggaaaagcgtggtgtcgttaagggacaaa

SEQ ID NO: 63343 - DNA, 40 bp, Bittarella massiliensis
  source 1..40: mol_type = genomic DNA
aataaaaactccccgtgccaaaggcacggggagttttttg

SEQ ID NO: 63344 - DNA, 40 bp, Bittarella massiliensis
  source 1..40: mol_type = genomic DNA
aataaaaactccccgtgccttaggcacggggagttttttg

SEQ ID NO: 63345 - DNA, 50 bp, Bittarella massiliensis
  source 1..50: mol_type = genomic DNA
aatattttctggtatcatctgggattatggtggtattttgtaggaaaaaa

SEQ ID NO: 63346 - protein, 528 aa, Dechloromonas agitata
MPTIMPPMTRPKVFSYRRFSSGRQASGHSLERQIASAQRWCEEHNLKLDQSLVLADLGVSAYKGHNITKGALAGFLEAAQSGKVPSGSILLVESLDRLTRTAIPDAVALLTSIVRAGIRVVSLIDGLEWNNETINDTASFMMSVFLFARAHEESATKSKRVSAAFQKKREQGLPVVSIMHGPGWVRPKSDRSGWELIPEKADSVRKAFAMASSGAGGISIAKSANRESWAFPWRTKSKSTEQWEHTSVSRLLRDRRVLGEWQPMKMVAGKLIPNGEVIRNYFPAAIAEEEWRAVQKALQGRSSPSRLRGIRADIFSGLLFCKCGKRMERKGKSSEGRGRVKYYCANRIAGISLCPSVPEAALIGPLLANIAQAEQYAFSPKEKSTRARNDFSKAEEKIRDLESRVAHIMKAIEEGGSNHLLLSRLMTLDQELQSANNELQIAKEELERLPTENQSFGYDMAKQAELYIDVKGAEKERLNLAVSLASVVSKIEWNDGFFVTTMRSGSTLMTNIPKAILEPKLGRPKIQR

SEQ ID NO: 63347 - DNA, 50 bp, Dechloromonas agitata
  source 1..50: mol_type = genomic DNA
atgtcggttttttgattgattgactagtcagttgcacattatgccgacta

SEQ ID NO: 63348 - DNA, 40 bp, Dechloromonas agitata
  source 1..40: mol_type = genomic DNA
cgtcgggtggcgaatcgattaccagatcgccacgccgggg

SEQ ID NO: 63349 - DNA, 40 bp, Dechloromonas agitata
  source 1..40: mol_type = genomic DNA
cgtcgggtggcgaatcgatttccagatcgccacgccgggg

SEQ ID NO: 63350 - DNA, 50 bp, Dechloromonas agitata
  source 1..50: mol_type = genomic DNA
atgtcttttcatgcatggcttgatttatcatttcttgttattgctgacta

SEQ ID NO: 63351 - protein, 544 aa, Saccharopolyspora kobensis
MATTARIESLRAVPKAPSRVVIYLRQSSYREESISLELQENSAREYCARKGYRIVDVIADPGVSGRAWHRRKGVQRALGAIHDKQADVIVLWRWSRLARHRLHFAVANDTVEKLGGRIESSAEPIDLDTAAGRFQRGMLGEFAAFQSDMIGEQWKDAHERRRRLGLPSNGRSRYGYVWLRPLPALASQGVVFSAPVDGGYLWLPEGDTQERYEIDPEQGEVVEWMYKEYIAGTGRPGLMRELNRLDITNNQGKPWTQHGIATVLDSGFAAGLLVNTAARYDGERQIYAPFSEYTWEQGAHEPIIDPDLFERYREIRLGRANTPPRRINPTNPWTGLVGCGDCTLNMRRKKNSRGTGFGWLCQSKEVTGKDERRATYVQENRLEQFVKEWLGQLADDIGAAAESARAAQRTALKARMSADTLQAELDGIEKQLGVLRRQLVAERMSEDEYDQTRAELIAERDSIAAKLARAEQTKAAEPVAQPTEIARGLLEEWNSLPLSKKREMLGKLIKRIVVTPHVLPRQPAHLHIVPTWDEDAGVDCSPYR

SEQ ID NO: 63352 - DNA, 50 bp, Saccharopolyspora kobensis
  source 1..50: mol_type = genomic DNA
tggggtcgattgctccccttaccgtgcaacaagggaagcaaaagaccctc

SEQ ID NO: 63353 - DNA, 40 bp, Saccharopolyspora kobensis
  source 1..40: mol_type = genomic DNA
tacgcccatcccagtgatctggagctggatgtacggcagc

SEQ ID NO: 63354 - DNA, 40 bp, Saccharopolyspora kobensis
  source 1..40: mol_type = genomic DNA
tacgcccatcccagtgatcatgagctggatgtacggcagc

SEQ ID NO: 63355 - DNA, 50 bp, Saccharopolyspora kobensis
  source 1..50: mol_type = genomic DNA
tggaatccagtgggtctctaaccgatcaagaagggacctctaggccccat

SEQ ID NO: 63356 - protein, 502 aa, Bacillus velezensis
MELQNRIQRVAIYLRKSRNKEGEETEETLRKHRKRLIDIANKNKWDYELFQEVGNSMNENRPEYQKLLSKLSEGIFDAVLSVNLARVTRDDAETPKFMSLLRQEDILFITDSERIYDLEVQEDWQALKFTGFVNNWEYENIKAQLRKGKKDSAKMGRWSNGVPNYGLVYNRFDRSLEIDQQKADAVKLAFQLVIDGLGVDRVAKELNRLGYKTNRGRYFSGNAINRMIRAEIYKSVLISNRLKGRNLHEGKLRPKDQWIIAENAAPPIIDEETWKMANEALDQRKLLSPRGKQKKHPLSNLIKCGLCGRTQTVSRRRDRNDALAIQPCNKTDPLGKSKCNNRGIKHDTMISLVIEAINEKYQEISSELIKFEEDTEANDIKSIKINKLQEQINKSKKALNILQIQLEEELINISSFKERRKIRQVELNNLEKELTELLEETKEDALKSKKSFANKLDFFLENWHTIDGADLNHELMSFINKIIWYAPRDSELPPQLKFEWRV

SEQ ID NO: 63357 - DNA, 50 bp, Bacillus velezensis
  source 1..50: mol_type = genomic DNA
cgggtagcttagcgaacatgtcactggtgccatgtccactaaactaacca

SEQ ID NO: 63358 - DNA, 40 bp, Bacillus velezensis; identical to SEQ ID NO: 29033
  source 1..40: mol_type = genomic DNA

SEQ ID NO: 63359 - DNA, 40 bp, Bacillus velezensis
  source 1..40: mol_type = genomic DNA
cggctattcgacgtgtcactagtgtcacgtaatggcccac

SEQ ID NO: 63360 - DNA, 50 bp, Bacillus velezensis; identical to SEQ ID NO: 54155
  source 1..50: mol_type = genomic DNA

SEQ ID NO: 63361 - protein, 502 aa, Bacillus velezensis; identical to SEQ ID NO: 63356

SEQ ID NO: 63362 - DNA, 50 bp, Bacillus velezensis; identical to SEQ ID NO: 63357
  source 1..50: mol_type = genomic DNA

SEQ ID NO: 63363 - DNA, 40 bp, Bacillus velezensis
  source 1..40: mol_type = genomic DNA
cggctattcgacgtgtcactggtgtcatgtaatggctcac

SEQ ID NO: 63364 - DNA, 40 bp, Bacillus velezensis
  source 1..40: mol_type = genomic DNA
cggctattcgacgtgtcactagtgtcatgtaatggctcac

SEQ ID NO: 63365 - DNA, 50 bp, Bacillus velezensis; identical to SEQ ID NO: 54155
  source 1..50: mol_type = genomic DNA

SEQ ID NO: 63366 - protein, 538 aa, Bradyrhizobium diazoefficiens
MDAQRQPKAYSYKRFSTPAQEQGDSLRRQTKMAEDWANRMGVPLDTELNLTDRGVSAYTGANRDVGALGAFLKAVEDGSVPAGAYLLVENLDRLSREPAFDASYYMQGIIRQGVTVVDLSDGFGREYNMETLRSPEGLYHLMAMLLSFARGNQESAQKARRVGEAYANKRVVFASDQKLTKPYTRRLPAWIRWREDTTSYELIEERAELLRWMFEMADEGMGAHSIAAQLNDAKEDTWGAGGWKAKYWHRSYVRKLLTNKAAIGIFVPHTVRKVEGKRSKERKPQEPILHRFPAAIDRELFDRVNARISTTEARGRNSNGPVRSIFAGLMKCQHCDGTVTRVNKGDHVYLVCSAAHAKAGTHPYESVPYYQAVSTFKAGLKRTLDTAPRGNDTADLDAEIEQLKVEIDAGEDAVNELLELAISDKSTTARDRLLKYEQELEALRDDMRSALERREVLMGANVEKRLAAVEQALTAEPMDTEEANKALRGAVSKMVMKPQEGRLHIRWHHAEQMQETLFITSRFDWDANQMEDEKQEQQ

SEQ ID NO: 63367 - DNA, 50 bp, Bradyrhizobium diazoefficiens
  source 1..50: mol_type = genomic DNA
cgccttttcccattgacgaaatcacctgctcatgtgattgcttcgatgcc

SEQ ID NO: 63368 - DNA, 40 bp, Bradyrhizobium diazoefficiens
  source 1..40: mol_type = genomic DNA
cggccgccggcggacatcacctgttgatgatcggcgcacc

SEQ ID NO: 63369 - DNA, 40 bp, Bradyrhizobium diazoefficiens
  source 1..40: mol_type = genomic DNA
cggccgccggcggacatcaactgttgatgatcggcgcacc

SEQ ID NO: 63370 - DNA, 50 bp, Bradyrhizobium diazoefficiens
  source 1..50: mol_type = genomic DNA
ggctttatccaaaggaagaaaccaacttctcatgtcttatattgggaggc

SEQ ID NO: 63371 - protein, 596 aa, Methylobacterium durans
MDDDDHRVPMTKEPPAIAYSYLRLSSKRQSNQADSKKYRDGYRRQIELRDAYLAENPHLTLDTQFVLHDIGLSGWTGANSDPDGDGKLALFLAEVRAGRIAAGSYLLVESLDRMSRQQVNLALALLLGLVNAGIIVVSLVDDQTYRASAAPTQFMISIMNLSRAHEESQMKASRLRATWEQKRRVATERKLSARCPSWLELVDGEFRPRDERVEIVREVLRLLSEGWGRDRIARELNERGVTPWGGAAIWHGGTVQKVTDARSLIGEFQPHKLVYEARKGIMVSKRVPVGDPIPDYFPRVVDDDLWDLAQAVAVKRRRGKAPNAGGRLGTVVSNLFGTVAHCEVCGQRMAYRDRGPRSFPVLRCSGERAGACSNGFRYFYHDNENAILSWLVTLDLSAGAAGEASRLDEELRTEVARTETLQAQGEAIVREVGAQTRFARAPLAEIEERMARSEQRIAELRARLATLKATGGNDERRMAVAHLVELFREKAPQAKVFAARSRIRQIIRDTFETMLCHPDGTIVITTIDGREHRFRDGYWWYEPDDMWVPWAGAMLGAGYQANKAELARRGIWLAAHRRARDAGLAAGTGLASNLVK

SEQ ID NO: 63372 - DNA, 50 bp, Methylobacterium durans
  source 1..50: mol_type = genomic DNA
tgccggccaactcgcaaccatgttgtctcgatgttgcgtgttcgccggca

SEQ ID NO: 63373 - DNA, 40 bp, Methylobacterium durans
  source 1..40: mol_type = genomic DNA
ggccgggatttatcacgtggtgtcgatctccgggctccac

SEQ ID NO: 63374 - DNA, 40 bp, Methylobacterium durans
  source 1..40: mol_type = genomic DNA
ggccgggatttatcacgtgccgtcgatctccgggctccac

SEQ ID NO: 63375 - DNA, 50 bp, Methylobacterium durans
  source 1..50: mol_type = genomic DNA
gcccggccagtatccatccatcttcccttgaatttgttctcttgcagata

SEQ ID NO: 63376 - protein, 576 aa, Serratia marcescens
MKLYSYQRWSSAVQEAGTTKARQEDAARAYALRNGLEYCEIVDSGVSAYRGANKQGALGKFIDAVQQGVIERGVTLYVESLDRISREGINNALRLFQDILELDITIVTGMDGKVFTKQSINDNPFDLMLSILVFIRANEESTKKSLRTNGNALALVERFKSGQSTNIKSMGGCPFWIDNSMSQYEAVKKDPKYWPIAEEIVQQFLDGKSVFQVVKYLNATYPEGCYGKPWNYANVRKVRLSKAIYGVKEITINGQKYTLDNYYPALCTEGEFLRLQIIKDNNKYIGKVGDQKNNINLLCGMKLFRCGHCGSTMMAMKHKNTIRYMCEKGRMDSNGCRLWSFGSLGIEHCLMLVLTYAYVDKNRKGLQNKTDYSTRIASKNEAIDEISKRITNTVELVSLGLSNVEEVKVLIEGLNKQRTVLKTELDVLVTQQALSDSIDFETLMHDFFTHAQYTVLQSVDHEYREELRKVVFAMMDSVIAWKYGKNLYFSFRIKDHDEYFNFVPGEAKNTYKLFIGGLPFNDEPEDDVALGKSLEGLVKAYRTVTEAQVKVIKMAGGMLEVVGYPVLDGKHFWTKK

SEQ ID NO: 63377 - DNA, 50 bp, Serratia marcescens
  source 1..50: mol_type = genomic DNA
tatgtggtagaaatttctttcggcaacccgaaaagaatttctgcgtatta

SEQ ID NO: 63378 - DNA, 40 bp, Serratia marcescens
  source 1..40: mol_type = genomic DNA
tatcatcagccaccccggcaacccgcgttacccgatcgac

SEQ ID NO: 63379 - DNA, 40 bp, Serratia marcescens
  source 1..40: mol_type = genomic DNA
tatcatcagccaccccggcttcccgcgttacccgatcgac

SEQ ID NO: 63380 - DNA, 50 bp, Serratia marcescens; identical to SEQ ID NO: 54200
  source 1..50: mol_type = genomic DNA

SEQ ID NO: 63381 - protein, 594 aa, Clostridium innocuum
MLNAGIIRKTELKRNYMMATDNQNRKAIVVMENTIKKTKLQSYLQINNYQPHNICFIQKGNNYPTILIAMIHSFRPDDLIVLRADELSSDPAAVQDILDISFRMKIRVISILDRITVKAQGAYLRKMEHMTFTSVVRQRTGNFWRADIYDKLGIENKEIKKKKRIGIYCRVSTREQTLGYSIDNQKNKCQDYMHLFNDDYTEAVLYIDEGHSASTLERPSIKQMLQDVRDRKLDEIIIYKLDRLTRNVIDTYELLNMFANNDVNLVAVMDNLDITTANGKLVVGILAIFAQWERETIVERTNDGLLQMAMEGKYPKSGVLLGYSKDKEKYLTINEETAPIIKSIFMYAKAGYPLSDIRIKIKEIYDYKLRTDRIKRIIFENGYYGEFTYKDYVFPDVMQAIVSKEDAMEAKKVVGKRSVAYGKEQNKFYYRNKITCKNCGNILGGIPTYKRNKKYYYYYCKKCNQRINQDVICHQAIHDMITHIDKADYTREAEDILRDINRLQRKLKTVSRQYAEDFLSDEAYDTIVKSINLKLNKEKARFGKIKIVNGYNWNELSDSEKRGFIEQTILTMYVDLSKKEIIKIEYHENDNEKK

SEQ ID NO: 63382 - DNA, 50 bp, Clostridium innocuum
  source 1..50: mol_type = genomic DNA
tggttcgtatatgtaacgcatgtggcaccatgtacaaatttaacgaacta

SEQ ID NO: 63383 - DNA, 40 bp, Clostridium innocuum
  source 1..40: mol_type = genomic DNA
ggttcgaatcccgtacgcgtcaccatttaaaccatacctc

SEQ ID NO: 63384 - DNA, 40 bp, Clostridium innocuum
  source 1..40: mol_type = genomic DNA
ggttcgaatcccgtacgcggcaccatttaaaccatacctc

SEQ ID NO: 63385 - DNA, 50 bp, Clostridium innocuum
  source 1..50: mol_type = genomic DNA
aggatagtatatttaatgcaggaggcactatctacagatagcaccatcta

SEQ ID NO: 63386 - protein, 485 aa, Intestinimonas butyriciproducens
MKAVIYARYSSDSQREESIEGQLRECKEYAERNGITVLSTYIDRALSAKTDNRPDFQRMIKDSANGLFDIVLVWKLDRFARNRYDSAHYKAILKKNGVKVVSAKEAIAEDSTGILLESLLEGYAEFYSVELSEKIHRGQKENALKGLNNGGGIPLGYVLGSDKRLAVDPMTAPVVLEIFTRYAEGETVRAIVESLNERGLQTKHNKPYSLGSFNAILKNRKYIGEYRYQDVVIPGGVPAIVPQELFDRVQARIARNKRAPAMSKADEAFLLTTKLFCGKCGRLMVGESGTSHTGKKHYYYKCGSAKRKTGCTKKAVKKDWIENLVVERTMQMIFDDTTLDAIASMVLDVQARENTSLPVLKAQLAQTEQGIQNMLNAIQQGIFTASTKQRLEELEATKERLSVSILQEELQKPHLSKEQILFFLQRFRAIDTTKPEQRQRLIDSFVNAVYVYDDKIILTFNYQDGTETITLDNINGSDLEAGCPP

SEQ ID NO: 63387 - DNA, 50 bp, Intestinimonas butyriciproducens
  source 1..50: mol_type = genomic DNA
cggttcggatttggaagcagggtgtccaccaaatcaagataatccgaacc

SEQ ID NO: 63388 - DNA, 40 bp, Intestinimonas butyriciproducens
  source 1..40: mol_type = genomic DNA
cggttcgatcccgcttatctccaccaaacggaacacccgt

SEQ ID NO: 63389 - DNA, 40 bp, Intestinimonas butyriciproducens
  source 1..40: mol_type = genomic DNA
cggttcgatcccgcttatcagcaccaaacggaacacccgt

SEQ ID NO: 63390 - DNA, 50 bp, Intestinimonas butyriciproducens
  source 1..50: mol_type = genomic DNA
gggtttggaaaggaaagcagggctagccccaagtcaccttcatcatttct

SEQ ID NO: 63391 - protein, 492 aa, Rhodococcus sp 008
MASIDGAVIYCRVSSDQSGRARSVSEQEADCRRTCEAEGWPVIDVVVDNDIGASRYSQGTRPGFLRLREELRRGVVLVSWESSRITRKLGEFAELRDFCADLGVQWFVGGRLYDLNEPNDNYMLGIAAQNAELEVALSRKRIMRAKDRTAATGTHNGWMPFGYVRGPDGWTVDPEAAPIVQEAVRRLLAGDSLRSLAKEFAERGVPAPSRGVGRQGSGWAKIGGKGLRSMVLSPTYAGIHVRRRHDKQTGERVEISRTRGDWEPLITEGEHTRLVAMLTDPSRSRTWGSQVTHLLSGIATCEVCGQGVKHSNMKSDLRPRYRCPDSHVKRAADELDRHVESAVVEFFSDHVRAAAAMYGDDEAAREAAELARELRQQLDAEILELTNANISASTRARMAEQMERSLLPKIEAAEARARQVGNPVLQKFANGDTREVWDSLSILDRREVVRECLKVTILRVKVRNPRRVFDPDTVEIVPKKTISIDSDWWKTD

SEQ ID NO: 63392 - DNA, 50 bp, Rhodococcus sp 008
  source 1..50: mol_type = genomic DNA
tatgggataattagcgcaacggtagaagccgtatgccaaagtcacccata

SEQ ID NO: 63393 - DNA, 40 bp, Rhodococcus sp 008
  source 1..40: mol_type = genomic DNA
cgggtccgccgtactcggtgaagccgtatgccgtcgtcat

SEQ ID NO: 63394 - DNA, 40 bp, Rhodococcus sp 008; identical to SEQ ID NO: 63393
  source 1..40: mol_type = genomic DNA

SEQ ID NO: 63395 - DNA, 50 bp, Rhodococcus sp 008
  source 1..50: mol_type = genomic DNA
tcacggaaaggggtagcaatggcagaagaggttggcacccatcacccata

SEQ ID NO: 63396 - protein, 492 aa, Rhodococcus qingshengii
MATIEGAVIYCRVSSDQSGRARSVSEQEADCRRTCEVEGWPVIDVVVDNDIGASRYSQGIRPGFLRLRELLQRGVVLVSWESSRITRKLGEFAELRDFCADLGVQWFVGGRLYDLNEPNDNYMLGIAAQNAELEVALSRKRIMRAKDRTAATGTHNGWMPFGYVRGPDGWTVDPEAAPIVQEAVRRLLAGDSLRSLAKEFAERGVPAPSRGVGRQGSGWAKIGGKGLRSMVLSPTYAGIHVRRRHDKQTGERIEVSRTQGDWEALITEGEHARLVAMLTDPSRSRTWGSQVTHLLSGIATCEVCGQGVKHSNMKSDLRPRYRCPDSHVKRAADELDKHVESAVVEFFSDHVRAAAAMYGDDKAAREAAELARELRQQLDAEILELTNADISASTRARMAEQMERSLLPKIEAAEARARQVGNPVLQKFANGNTKEIWESLSILDKREVVRECLKVTILRVKVRNPRRVFDPDTVEIAARKTIPIDADWWTKE

SEQ ID NO: 63397 - DNA, 50 bp, Rhodococcus qingshengii
  source 1..50: mol_type = genomic DNA
tatgggagacttagcgcaacggtagaagccgtatgcgaaagtcacccata

SEQ ID NO: 63398 - DNA, 40 bp, Rhodococcus qingshengii; identical to SEQ ID NO: 63393
  source 1..40: mol_type = genomic DNA

SEQ ID NO: 63399 - DNA, 40 bp, Rhodococcus qingshengii; identical to SEQ ID NO: 63393
  source 1..40: mol_type = genomic DNA

SEQ ID NO: 63400 - DNA, 50 bp, Rhodococcus qingshengii; identical to SEQ ID NO: 63395
  source 1..50: mol_type = genomic DNA

SEQ ID NO: 63401 - protein, 584 aa, Pseudomonas putida
MPTAYAYIRYSSKAQGEAGRDSVDRQMASIQAITKQQGIELPPENIYSDTGISAHDGSNKRKGKLKELIDMISDMHIKEGDYIFVESIDRLSRQRLLQAKELVNGILEKGVILITTIDGQRYEKPNETNRIDDLQQDILLSVIAKRAYEESKTKSVRRKSAWNRAKKLAEEEKVIFNAHNPPYGIRYNTELNCFEIEEEEAQEIRDFFESLKYVGVSLSIKKLNAYSKRKWSSRNIKHLIDTKYVLGAYMAQRRDENKKKVFERYIENYYPQIVSYELFNEAIAAMKNRAQRKNYGNQSVGSLNIFRHSIKCDCCEASMLFEKQTNPKGVVYPYFQCYTRKELKNGCDQPRFRFDLAFGLFLELIYQSTTDEDFDVHPWQNEMPDTEIEYEWITRESGMRYRLPTKEDIDEEERVENFKELLIKLLSNRENQTKDNKIIFELSNLLLEQKSYRDNLMKSFAGFTSGVIPQEFLQVVSKTEATINDIEQNLAELQTQINIKKTTINIYSENDIIDLYKTEDGRLKINQFFVANDITFKFKFDKTSRTLFAKIFQNGFEIDRIAKQFSLHNPLKEFGINNLNEYFN

SEQ ID NO: 63402 - DNA, 50 bp, Pseudomonas putida
  source 1..50: mol_type = genomic DNA
atgtggggaacacccctaccattcgagatcggtagatggtattctcacac

SEQ ID NO: 63403 - DNA, 40 bp, Pseudomonas putida
  source 1..40: mol_type = genomic DNA
ggtgttacgcgagccgttggagtccggtgaaatcgtgatt

SEQ ID NO: 63404 - DNA, 40 bp, Pseudomonas putida
  source 1..40: mol_type = genomic DNA
ggtgttacgcgagccgttgttgtccggtgaaatcgtgatt

SEQ ID NO: 63405 - DNA, 50 bp, Pseudomonas putida
  source 1..50: mol_type = genomic DNA
gtgctgggaccagacctccctttcttgatgggaataaatgatactaacag

SEQ ID NO: 63406 - protein, 404 aa, Frankia casuarinae
MVTESSRLDRRDDLDAQAEILLGIRSAGGDIISIAEPQFGRTDFAGRIVTLVAQHANAEKSKTVKQTTYRGISMIMGNGAHHGPLPTFWAANGERYAKQAYCVDPKSVRDIYERVANRESLQSIGRVYDLYPASVKNLVRFTANHTGVEECRYTYGGVTETWAHEVTPVVDSALWWRANNVLAANLTDGRGNKGGRPVARPVNWMSGVLDCPSCGGRVHVNAGLTPAGNPRTPKLRCGGHAKQRKACGLFTGCDALPIIEVIESMFSHDTTPILAFQRVAGNAHELDEMRAELARIQSRLSVTEDDDKLDELVATRKALRVAIEQFEVIPDVYDYAETGRTVADTWAAGDTDEKRGMVRAVKDSWGIELSDHDGTWGIKIGTEFADASGANGIVDLGNGFCFRG

SEQ ID NO: 63407 - DNA, 50 bp, Frankia casuarinae
  source 1..50: mol_type = genomic DNA
gtgtgcacaacccgacttgcaacggtcgtaggttgtcgggtagtgtgcac

SEQ ID NO: 63408 - DNA, 40 bp, Frankia casuarinae
  source 1..40: mol_type = genomic DNA
cgtgggtgagcacgatcgggtcattgtcgacgtaaaccac

SEQ ID NO: 63409 - DNA, 40 bp, Frankia casuarinae
  source 1..40: mol_type = genomic DNA
cgtgggtgagcacgatcggctcattgtcgacgtaaaccac

SEQ ID NO: 63410 - DNA, 50 bp, Frankia casuarinae
  source 1..50: mol_type = genomic DNA
atgtgtccaggaattcatgcatctcttctaggttttctagttgtgtgcac

SEQ ID NO: 63411 - protein, 404 aa, Frankia casuarinae
  SITE 305: note = misc_feature - Xaa can be any naturally occurring amino acid
  SITE 376: note = misc_feature - Xaa can be any naturally occurring amino acid
MVTESSRLDRRDDLDAQAEILLGIRSAGGDIISIAEPQFGRTDFAGRIVTLVAQHANAEKSKTVKQTTYRGISMIMGNGAHHGPLPTFWAANGERYAKQAYCVDPKSVRDIYERVANRESLQSIGRVYDLYPASVKNLVRFTANHTGVEECRYTYGGVTETWAHEVTPVVDSALWWRANNVLAANLTDGRGNKGGRPVARPVNWMSGVLDCPSCGGRVHVNAGLTPAGNPRTPKLRCGGHAKQRKACGLFTGCDALPIIEVIESMFSHDTTPILAFQRVAGNAHELDEMRAELARIQSRLSVTEXDDKLDELVATRKALRVAIEQFEVIPDVYDYAETGRTVADTWAAGDTDEKRGMVRAVKDSWGIELSDHDGTXGIKIGTEFADASGANGIVDLGNGFCFRG

SEQ ID NO: 63412 - DNA, 50 bp, Frankia casuarinae; identical to SEQ ID NO: 63407
  source 1..50: mol_type = genomic DNA

SEQ ID NO: 63413 - DNA, 40 bp, Frankia casuarinae; identical to SEQ ID NO: 63408
  source 1..40: mol_type = genomic DNA

SEQ ID NO: 63414 - DNA, 40 bp, Frankia casuarinae; identical to SEQ ID NO: 63409
  source 1..40: mol_type = genomic DNA

SEQ ID NO: 63415 - DNA, 50 bp, Frankia casuarinae; identical to SEQ ID NO: 63410
  source 1..50: mol_type = genomic DNA

SEQ ID NO: 63416 - protein, 519 aa, Clostridium neonatale
MILKRVAIYSRKSITTDTGDSIENQIAAVEKYFSTDKCEFTLFEDEGWSGGNDKRPDFQRMMTKIKNNEFDVVAVYMLDRVSRNVVDFINFYDTLKKHNVAFTSVTENFDSSTMMGKMYMYLLSIFAEMERENISKRVKDNKLFLTKQGQWCGGKPPTGYTLTKKTVNDKKITYLELDNDKKQIIIDIYNKYLELGSLHKVQQWFLLEHNIKWSLSTVKYILSSPVYCISDDNSYKYLSNQYKIYGEPDGHSGYITYDNRKNASTKREWKSKDMFVSVSQHEAIIPSSLWIKIQELQKERATAPRPKASKISWFTNVLKCDICGSPMTLNYNHTNKDGARNYYYICTGKRSYGTSYCSNKWIKQKECDEKIIQFLETVTSSKSNFQKMLNTKVEDNSVDKDIKKIEKEIIKQNNVIKELTEKMIVLRGPALDIVTNQMNEIGDHIVELKNKLNLLERKSLNQKNSSRSVDMIYSEIKKLPAILRDSNIDIDRKRDLVNMFLDEIRWNSNTQLLSTSINT

SEQ ID NO: 63417 - DNA, 50 bp, Clostridium neonatale
  source 1..50: mol_type = genomic DNA
tagggtatttatatttggcgtggtactacagtccaaatataaataccgta

SEQ ID NO: 63418 - DNA, 40 bp, Clostridium neonatale
  source 1..40: mol_type = genomic DNA
taccgttggatggactggtacaattaatacaaaacctcct

SEQ ID NO: 63419 - DNA, 40 bp, Clostridium neonatale
  source 1..40: mol_type = genomic DNA
taccgttggatggactggtagaattaatacaaaacctcct

SEQ ID NO: 63420 - DNA, 50 bp, Clostridium neonatale
  source 1..50: mol_type = genomic DNA
taaggcattaagttttggtgtgatagttcaggggaagtaaaaatacattg

SEQ ID NO: 63421 - protein, 510 aa, Mycolicibacterium obuense
MRVLGRVRLSRATEESTSVERQREIIQQWADASDHTVVGWAEDIDVSGSVDPFDTPQLGPWLGERAPEWDALVAWKLDRLGRNAIQLSKLFGWAQEHGKTVVSCSESIDLTTWAGRMLASVIAGLAEGELEAIRERQKSSRAKLRQTARWPGGKPPYGYAAIKGDAGWTLVVDEEAAAVVRRVVGEVIDGKGLASIAKQLTAEGYLIPSRYYETVKAGTPTIRVDGGDSGTWRTTALRNMLRSRALRGFAHHNGETVRDADGAPVELAPALITGDEWQLLQGALDRIQEAKSRPRPEASPLSGVVFCLDCGGPLHHDRTSVKRENRTYVYRYYRSACGHTPMLRADDLEQQVEDAFLHTLGDVLIRERVWVPGDAREADRREAIEALDDLAEALSRAASETTRQRLQMQIEKVDRRLAELDSQPAREARWEYRPTGGTYGSAWKAADAAGRRQLLIRSGITIAARQLETAIRVPPEIWDMAGIDGTEVMARREAAASVERVEAGVPDPFV

SEQ ID NO: 63422 - DNA, 50 bp, Mycolicibacterium obuense
  source 1..50: mol_type = genomic DNA
attttgcgcagcccgatattcggcgaatagaacatcaccttgaacacaac

SEQ ID NO: 63423 - DNA, 40 bp, Mycolicibacterium obuense
  source 1..40: mol_type = genomic DNA
attgggcgcgatacgcggcgaatagaacagaacccgaaac

SEQ ID NO: 63424 - DNA, 40 bp, Mycolicibacterium obuense
  source 1..40: mol_type = genomic DNA
attgggcgcgatacgcggcaaatagaacagaacccgaaac

SEQ ID NO: 63425 - DNA, 50 bp, Mycolicibacterium obuense
  source 1..50: mol_type = genomic DNA
agtgtgcctcctatgagattcttgaaatagaacatgatcttgaacccaaa

SEQ ID NO: 63426 - protein, 468 aa, Cellulosimicrobium cellulans
MTTAAIYVRQSKDATGDGLAVARQEALCRELAAARGFTVGKVYRDNDRSSKAGGKRPEYERLVHDYEAGRVAALLCYDLDRLTRVPRELEDWCDRTERSGLLIVTANGEADLGTDGGRMYARIKAAVARSEVERKGERQKAANRQRVMSGRVYGRKLTVGWHDLECTEPDEPVHERIRAAVADVLAGASLSSIAARWNAEGWRSPAGKPWSHVTARQFLVRPVNFGLVTYKDEEYRDVVAQWAPVLDVKTYDALRAELSSRGNATQTAATVRTFLLGGLLRCGKCGSTMTGATQKSGVNYLCSGRAHGCYRAVRASVADEYVLEETVRALLNHDPSDELPDEHLVRLRAIVRELETIARERAEVATSTVSVSAKLALMTDLDTRERGLRAESAELTKDAAVADMMRQITWPDPTDEEATTDALIEYHELTGRRLRKLSLRQQRFLVEKFGTYEVLDRSARGRVRRVRA

SEQ ID NO: 63427 - DNA, 50 bp, Cellulosimicrobium cellulans
  source 1..50: mol_type = genomic DNA
actacggtgactgaagtgttgtccagtgtcaaccttgcagctaacgtagt

SEQ ID NO: 63428 - DNA, 40 bp, Cellulosimicrobium cellulans
  source 1..40: mol_type = genomic DNA
gaactcgggcgcctcgtcgaggaagagcacgccccggtgc

SEQ ID NO: 63429 - DNA, 40 bp, Cellulosimicrobium cellulans
  source 1..40: mol_type = genomic DNA
gaactcgggcgcctcgtcgtagaagagcacgccccggtgc

SEQ ID NO: 63430 - DNA, 50 bp, Cellulosimicrobium cellulans
  source 1..50: mol_type = genomic DNA
actgccctggggtaactgttgtcctaagtgacctttaaagataatttaga

SEQ ID NO: 63431 - protein, 592 aa, Aeromonas caviae
MIYAKSSVSDLTMKSYLYSRISTLQQVQGFGIARQIQTVTDFLENAVIDARLGYQLDPNDYEILESDIGKSAFKGDNWGSNSNLGRFYEDVINRRITRGVLIVENIDRLTRLSNYDASHKLTTLITSGIDIIEVESVTCFSVRIPDSLSVLAMSISRAHNESKRKSTMGQKTWTNRINQLKNEGKASAKICPRWLSIENDKYVLDEEQAQILLSIHQMFLDGHGNTAIVRRLNDEGKLNNGVLWNTLTLQKVLKDERLTGRGIIGKQRIIHDKDISKEEKDKIIKDKLVYIDNAFPVVVPMELFSRVQSKINSSKHGSKNPKTTKNMRNLFNGLSKCGVCGNQMIVCKNGHGNQFYTCLGRRSEKTCSNVGTNYYSFERLLLKNLKEINWDTIYNGSKSNNANSIDEQRQKIIEVEQSIKAFNNELIGLDDDNLELRIIRKIKKNKEILKSLVTDLNGLMTKEISHVEFEPNLELVHDQGNVKLRQDTNVALRKVIRSIDITRNENLVISFIKYYTDTISHLFIYDIKKNNTISKTYMTDDLVFHFDAGSIDVKTGKVELTGKELKEEDKIAFDIWLETFESAVKEVVKIEQ

SEQ ID NO: 63432 - DNA, 50 bp, Aeromonas caviae
  source 1..50: mol_type = genomic DNA
cggcgtaaagtgtttacatgtttcttggaactgtgatatgatttacgcca

SEQ ID NO: 63433 - DNA, 40 bp, Aeromonas caviae
  source 1..40: mol_type = genomic DNA
gcggcacaatgtcggtcagttatgacaaatattgtgcccc

SEQ ID NO: 63434 - DNA, 40 bp, Aeromonas caviae
  source 1..40: mol_type = genomic DNA
gcggcacaatgtcggtcagtcatgacaaatattgtgcccc

SEQ ID NO: 63435 - DNA, 50 bp, Aeromonas caviae
  source 1..50: mol_type = genomic DNA
catctcaaatccattacatgtttctcaagcctgtgattttatatacgtaa

SEQ ID NO: 63436 - protein, 487 aa, Microbacterium esteraromaticum
MTDTRAAIYARISLDKTGEGLGVERQRSACIALAELRGWQISPEHIWVENDTSASTGHRPKFAAMIAAAEAGAFDVIIAWHVDRLTRKLTELEDLIALSDRTGVKIATASGDVDLTTDSGRLVGRILASVARGEVERKGTRQRAANQQRAEKGLMPKGRAFGYEKDGTPDETEAPIVRDLFSRFAVGEGLHTLTRSLADAGVMNTRGKPWTRAGVRDLLTNPRYIAERWILRSQPDGSRAREYVGPGVWEPLVSEDLFRAVGAILSDPARRERFGQRGNARRYLGAGCYVCGECGAPLKTGYSRSTPTSQYRTYVCPDGYHVSRRADYIDEVVDAVIGKRLNDPKIAEAVANDDQADVRALRDESNGIRARIDGFASDLADGLLTARQVKLATDRAEARLREVDAQLASIGSASALGGILGATDPAAAWRAIEDVNARATVVNALCTVRIQRQPRGRRPSHANPEKVEAWWEKLVETIEFDWHRADA

SEQ ID NO: 63437 - DNA, 50 bp, Microbacterium esteraromaticum
  source 1..50: mol_type = genomic DNA
tacgagttgacgcagcacgtactgccatgtaagttgtgaagtacaaggta

SEQ ID NO: 63438 - DNA, 40 bp, Microbacterium esteraromaticum
  source 1..40: mol_type = genomic DNA
gcgaacgcagcacgtactgcaggattccgccgttgcggta

SEQ ID NO: 63439 - DNA, 40 bp, Microbacterium esteraromaticum
  source 1..40: mol_type = genomic DNA
gcgaacgcagcacgtactgtgggattccgccgttgcggta

SEQ ID NO: 63440 - DNA, 50 bp, Microbacterium esteraromaticum
  source 1..50: mol_type = genomic DNA
gaggagttggtttggcaggtgctgtgatgagagatttgcatcagaaagta

SEQ ID NO: 63441 - protein, 415 aa, Nocardia otitidiscaviarum
MVEDYRAGRFNALITWDLDRLTRQPRQLEDWIDAAESNGLRLVTANGEADLQTDGGRMYARIKAAVARAEMERKGARQSRAHKQRAEKGIPPRGIRAVGYTSRGELVPEEAEVIREVFHAFANGTSLRALAAALSGAKPAVRQVGNYQVKDLPTNVRPLPSRNGRPWHVSTVRHILRNPRYAGWSMLGGEILRDKTGAPVRGQWEPVVSDGVWMEVQRRLDDPARITNRAGTERRHLGTGLYICGLCGDPLLPRVKVNLKGYLCKGHLSRSRRQVDAFVLEYIRLRLAQPDLAQLLTDTDDDRTAELAQAEQVQRDRIDRARADYKAELIDGDLYKEIREEAEAEAARLEAERLTITAGTTASAILSAPSPVDAFDMADLAAKRAVIDLLCEVWLWPSPRGRQQFDPTTVEIRPK

SEQ ID NO: 63442 - DNA, 50 bp, Nocardia otitidiscaviarum
  source 1..50: mol_type = genomic DNA
gatggtgttcggggttgaatctcgcccgcgtttcaacgtaaaataccttc

SEQ ID NO: 63443 - DNA, 40 bp, Nocardia otitidiscaviarum
  source 1..40: mol_type = genomic DNA
ccaggtaaatccgcagttgcccgcgtttcaccgcctcatc

SEQ ID NO: 63444 - DNA, 40 bp, Nocardia otitidiscaviarum
  source 1..40: mol_type = genomic DNA
ccaggtaaatccgcagttgtgcgcgtttcaccgcctcatc

SEQ ID NO: 63445 - DNA, 50 bp, Nocardia otitidiscaviarum
  source 1..50: mol_type = genomic DNA
tatgatgttacatattgcaatttgtgcctttttcaacacaaaatagcttt

SEQ ID NO: 63446 - protein, 511 aa, Bittarella massiliensis
MNIAAYCRVSTDKEDQLNSLEAQKEFFSEYTKRTGDNLVRLYADEGISGTKIKNRKEFLRMMADAEHGLFDMVVVKDISRFARNTVDLLQNVRKLKALGIETQFLTANMTSMGNSEFVLTIFGALAQEESANTSKRVKFGKKMNAEKGRVPNIVYGYDKTIGDYFNLAINEEEAAVVRQIYQWYIKDGYGAAKISIFLNERGLRTKRNCQWSQNGVCRILTNELYTGKIINGKQEVTDFLTGQRADKDASEWMVVDRPDLRIIDPETFEQAQQIMKSRGKAFKVDKERQSNKYLFSTLIKCKECGWSFRRTVRTYKNTYVRWVCSGHNGRGADNCPNAVTVDEDELIEVLQEYFAGLLKAKKNVIRYVVGEFQRVYKAKDENLNYEKELTAQLAKLQKTRQKYMDMYADDLISREELNNKIGGMRKEIERLENELKMVSYHLTKGEQLESVLQQTFKEIEDITDVRQMTNAQLKRIIQKIEVDKDGNVDIYLRLLGDLGLDETVLIRNDET

SEQ ID NO: 63447 - DNA, 50 bp, Bittarella massiliensis
  source 1..50: mol_type = genomic DNA
ccgttctaattcgtaacgacgaaacatacggaagtgataaattagaacgg

SEQ ID NO: 63448 - DNA, 40 bp, Bittarella massiliensis
  source 1..40: mol_type = genomic DNA
ggtgagcaagtccacggtgcacaaggatgtgtccgaccgg

SEQ ID NO: 63449 - DNA, 40 bp, Bittarella massiliensis
  source 1..40: mol_type = genomic DNA
ggtgagcaagtccacggtggacaaggatgtgtccgaccgg

SEQ ID NO: 63450 - DNA, 50 bp, Bittarella massiliensis; identical to SEQ ID NO: 55750
  source 1..50: mol_type = genomic DNA

SEQ ID NO: 63451 - protein, 487 aa, Corynebacterium glutamicum
MTLRAAIYARISLDRKDEAGVKRQAHLATKLAEAEEATIVAEYVDNNASAFSGMYRPEYENLLKSIEAGELDVVYVYALDRLTRRTKDTLALFELCEKHNVRIKATQGYSIDPSDPSSRIIIVILGLIAEQESIDRAARIRASYVDRARVGRPKTGGRRMLGYEADAETIIENEAQAIRDAAVMILAGKTLRETVREIFHARGITATSGRDMTAPTLRDILLNPRVRGISTFNPTDPVTGYRLIRDRQIIGPGQWPAIIDEATGEKLDAVLRDPSRRRSHAGNAPTRYLASVLTCTCGDPMYSRTRAREDGSRRRYYACGRGIPGGTHVTIGDEVDSLIERVIIGRMAKPDGLELLQQSLSTNKDSTETEELQELVSQRNALLARLEMLEDSLIDGEIGVDAFTRLEKKIAEQLTGIDDRLQILTTARTADPLAVELVGVTDFALWWENASVEDKRRLTRILMDIHILPGTHGAKKFDPTRVQVTWH

SEQ ID NO: 63452 - DNA, 50 bp, Corynebacterium glutamicum
  source 1..50: mol_type = genomic DNA
ggttgtcactacccatgttctgttaataacgaatgtggtttgtgggtacg

SEQ ID NO: 63453 - DNA, 40 bp, Corynebacterium glutamicum
  source 1..40: mol_type = genomic DNA
cggagctacgggcagtggaaaatccgaacttttaagaaca

SEQ ID NO: 63454 - DNA, 40 bp, Corynebacterium glutamicum
  source 1..40: mol_type = genomic DNA
cggagctacgggcagtggacaatccgaacttttaagaaca

SEQ ID NO: 63455 - DNA, 50 bp, Corynebacterium glutamicum
  source 1..50: mol_type = genomic DNA
agctgtcagcatgagttatctgttcacaaagaatgtcttttatgagtaag

SEQ ID NO: 63456 - protein, 537 aa, Bradyrhizobium septentrionale; identical to SEQ ID NO: 62626

SEQ ID NO: 63457 - DNA, 50 bp, Bradyrhizobium septentrionale; identical to SEQ ID NO: 62627
  source 1..50: mol_type = genomic DNA

SEQ ID NO: 63458 - DNA, 40 bp, Bradyrhizobium septentrionale
  source 1..40: mol_type = genomic DNA
gcgcatcgacgatgttggcgcacccgacacgattcgaacg

SEQ ID NO: 63459 - DNA, 40 bp, Bradyrhizobium septentrionale
  source 1..40: mol_type = genomic DNA
gcgcatcgacgatgttggcctacccgacacgattcgaacg

SEQ ID NO: 63460 - DNA, 50 bp, Bradyrhizobium septentrionale
  source 1..50: mol_type = genomic DNA
ggcctagggattgctccacctggcctgccacagcctatgcccatgggcac

SEQ ID NO: 63461 - protein, 529 aa, Tsukamurella pulmonis
MRALIVVRLSRVTDATTSPERQLAACQELCQARGYEVVGVAEDLDVSAGKTSPFDRPQLGRWLRDPSQFDVIVFFRVDRIVRRLFDLADLIRWARGHNVTLVSATESHFDLSTDFGDIIALLVAKVAEMELNAISERNASASRHNIRAGKYRGGIPPWGYLPEKTDDGEWRLVQDPEQVDVIHEVVERVLKGEPLRAIAHDLTKRGIPTPRDRFAQLRRRPTSDYEWHSAPLKRSLTSQAMLGRVITREPLTDAHGNVQRDAKGRKVFGPETVVVGDDGSPVVRAEPILSRDMFERVGVELEGRENRKEPTKRSSGLLLRVIYCGVCGRPAYRLKGGKGRKPRYRCASAQYKDQCDNRTVSLEWADDEVERRILENMGPLERRKRVWFAGNDHTSELDEVNDLLADLTDQLGTGAFKRGTPQRARLDQRIVLLTERQAELSATPSKPAGWVWEPTGELFADWWERQDTEARNVWLRQMDFKVTWTSHTEGSRTILDTFKLDGDLTLNLDADQTFGRLLEMVEAYNEGAR

SEQ ID NO: 63462 - DNA, 50 bp, Tsukamurella pulmonis
  source 1..50: mol_type = genomic DNA
cgggtgtaaaagcgaacgttggaatagtcgattatggtggtttacacccc

SEQ ID NO: 63463 - DNA, 40 bp, Tsukamurella pulmonis
  source 1..40: mol_type = genomic DNA
gggcatgtccaccgtggagtacgcgatcggcacgatcgcg

SEQ ID NO: 63464 - DNA, 40 bp, Tsukamurella pulmonis
  source 1..40: mol_type = genomic DNA
gggcatgtccaccgtggagaacgcgatcggcacgatcgcg

SEQ ID NO: 63465 - DNA, 50 bp, Tsukamurella pulmonis
  source 1..50: mol_type = genomic DNA
tgggcttatgggatacagctggacaagaagattatgacagattacgcccc

SEQ ID NO: 63466 - protein, 515 aa, Notoacmeibacter marinus
MTQKDTSIESEKAALIYCRVSSKRQKDQGSGLDSQEHRCREYAAGKGLHVEAVFPDDISGGGDFMKRPGMVALLAYLSAQTDKRYVVIFDDLKRFARDTEFHIKLRRELSDRNASVECLNFKFEDTPEGKFIETVFAAHGELERQQNGRQVVQKMKARVEQGFWVFQAPFGYRYEKSKRGGKELVRDEPVASVIAEALEGYASGRFATQVEVQRFLESQPSFPKDFPDGTIRPWKATRLLTRPVYAGYVHAPMWGGSLRKGQHEGLISYRTFEKIRQRLEQGVYAPARKDMRDDFILRGAVQCAECETPLTSSWSKSKTGKKHPYYRCYNKGCNSYGKSIRRAEIESEFETLLQSLEPEAGLFEISRAMFAQAWDQRLAQTSEILAGLKKQMADADKQVARLLERIVETDNPSVISAYEKKIERLEQSKLITAEKVQKQSRPKHSFEEMFELALGFLSNPWKLWDSGNMHLRKMVLRLAFTDRLSYHREKGFLNPKKSLPFKMLEGISLPGKQMV

SEQ ID NO: 63467 - DNA, 50 bp, Notoacmeibacter marinus
  source 1..50: mol_type = genomic DNA
ggatttccctgccgggaaagcaaatggtgcgcctacagggagatagttcg

SEQ ID NO: 63468 - DNA, 40 bp, Notoacmeibacter marinus
  source 1..40: mol_type = genomic DNA
cgatacgtcttcgaaaagatggtgctgccggagagattcg

SEQ ID NO: 63469 - DNA, 40 bp, Notoacmeibacter marinus
  source 1..40: mol_type = genomic DNA
cgatacgtcttcgaaaagacggtgctgccggagagattcg

SEQ ID NO: 63470 - DNA, 50 bp, Notoacmeibacter marinus
  source 1..50: mol_type = genomic DNA
gccgttcccggccggggcagggaacggtgcgcctgcagagccagatttcg

SEQ ID NO: 63471 - protein, 452 aa, Listeria seeligeri; identical to SEQ ID NO: 39176

SEQ ID NO: 63472 - DNA, 50 bp, Listeria seeligeri; identical to SEQ ID NO: 39242
  source 1..50: mol_type = genomic DNA

SEQ ID NO: 63473 - DNA, 40 bp, Listeria seeligeri; identical to SEQ ID NO: 21013
  source 1..40: mol_type = genomic DNA

SEQ ID NO: 63474 - DNA, 40 bp, Listeria seeligeri; identical to SEQ ID NO: 28289
  source 1..40: mol_type = genomic DNA

SEQ ID NO: 63475 - DNA, 50 bp, Listeria seeligeri
  source 1..50: mol_type = genomic DNA
tttcttagcatttaatttctctcattagggagaagttaaatgaaatttaa

SEQ ID NO: 63476 - protein, 485 aa, Clostridium leptum
MKGVIYARYSSDNQREESIEGQLRECKEYAERNDIMILGTYIDRALSAKTDNRPEFQHMIKDSAKGLFDVVLVWKLDRFARNRYDSARYKNILKKNGVKVISARENISEGSEGIILEAMLEGYAEYYSAELSEKVIRGLTDNALKCKYNGGTVPMGYYIDEQQYYQIDPKTAPVVLEMFTRYSEGATMQELVNLLNSRGMRSIRGGKITLNIMNHLLKNRRYMGEYSYRDVVKEDGIPAIVPKELFERVQERLAKNKKAPARHKAEDDYLLTTKLYCGKCGSFMVGESGTSHTMKVHRYYRCVNTKKKKLCDKKAVKKDWIEDLVVSYTMKAIMNDEVMERLIDTLMELQKRESTDLPLLKKQLSETEKGINNMLNAIQAGIFTPSTKQRLDELEETKSQLEISILQEEMHKPILTREQIAFFIYRFRKFDVTKREQRQRLIDSFVNAVYLYEDKIILTFNYKDGSKTITLAEVEGSDLSVLGAP

SEQ ID NO: 63477 - DNA, 50 bp, Clostridium leptum; identical to SEQ ID NO: 17467
  source 1..50: mol_type = genomic DNA

SEQ ID NO: 63478 - DNA, 40 bp, Clostridium leptum
  source 1..40: mol_type = genomic DNA
ggttcaagtcctgttacccgcaccaaatggagtgttcata

SEQ ID NO: 63479 - DNA, 40 bp, Clostridium leptum
  source 1..40: mol_type = genomic DNA
ggttcaagtcctgttaccccaaccaaatggagtgttcata

SEQ ID NO: 63480 - DNA, 50 bp, Clostridium leptum
  source 1..50: mol_type = genomic DNA
ggtgaggaaggggctgtactggcccaaccagaaaccaaaactacgaaccc

SEQ ID NO: 63481 - protein, 513 aa, Eubacterium rectale
MRNYVIALYIRLSVEDFKTESLSIPNQKLILREKAMSLPEWDNSEILEFIDNGHTGTNFERPAVQELLTMVQAGKINCIIVKDLSRFGRNSIETGYFIERVFPLYHTRFISVSDDFDTANFKGDTGGIDIAFKYLISECYSRDMSMKTKSAKYAKMRRGEYQSVICPYGYRKSADGRMEPDEDVAPNVQMIFQWASEGNTAAEITRKLYAMNIPTPGEYRKLKGKDYYNVSRTNGVWSTSTVLRILEDQRYIGTYVIGKRKVKEIGSRHTQLKDESEWFKIPNHHPAIVSVDLFEKANASIKRFSLSNKKPRDYLLRGKVFCGCCDHAMSLRNGAWFYCRHSEVAETLPCHGVRIKMADLEQVVFETIRAQMCPALGIDSNKDKLDLQTVQQAEHEEKLRSIQDSKRHLYEQYALGEIDLETYRTRKAVYDTELVQAKNVHAVITAQTKQIKSDYEIKLKQQEIVQEVGNANMLTKALIDRLINKVYVFPGDRIEIEYATQDFLETKQSEKEV

SEQ ID NO: 63482 - DNA, 50 bp, Eubacterium rectale; identical to SEQ ID NO: 14627
  source 1..50: mol_type = genomic DNA

SEQ ID NO: 63483 - DNA, 40 bp, Eubacterium rectale
  source 1..40: mol_type = genomic DNA
aagcaacgacgcatgcgtatgtctaagtccgtgaatggaa

SEQ ID NO: 63484 - DNA, 40 bp, Eubacterium rectale
  source 1..40: mol_type = genomic DNA
aagcaacgacgcatgcgtacttctaagtccgtgaatggaa

SEQ ID NO: 63485 - DNA, 50 bp, Eubacterium rectale
  source 1..50: mol_type = genomic DNA
tttaatgtgcctgaaaagtacgggctccgttacaggcactaatggaaaaa

SEQ ID NO: 63486 - protein, 492 aa, Rhodococcus qingshengii
MASIDGAVIYCRVSSDQSGRARSVSEQEADCRRTCEAEGWPVIDVVVDNDIGASRYSQGTRPGFLRLREELRRGVVLVSWESSRITRKLGEFAELRDFCADLGVQWFVGGRLYDLNEPNDNYMLGIAAQNAELEVALSRKRIMRAKDRTAATGTHNGWMPFGYVRGPDGWTVDPEAAPIVQEAVRRLLAGDSLRSLAKEFAERGVPAPSRGVGRQGSGWAKIGGKGLRSMVLSPTYAGIHVRRRHDKKTGERVEISRTRGDWEPLITEGEHTRLVAMLTDPSRSRTWGSQVTHLLSGIATCEVCGQGVKHSNMKSDLRPRYRCPDSHVKRAADELDRYVESAVVEFFSDHVRAAAAMYGDDKAAREAAELARELRQQLDAEILELTNANISASTRARMAEQMEQSLQPKIEAAEARARQVGNPVLQKFADGDTKAVWDSLDILDRREVVRECLKVTILRVKVRNPRRVFDPDTVEIVPKKMISIDSDWWKTD

SEQ ID NO: 63487 - DNA, 50 bp, Rhodococcus qingshengii
  source 1..50: mol_type = genomic DNA
tgtgggaggattagcgcaacggtagaagccgtatgccaaagtcacccata

SEQ ID NO: 63488 - DNA, 40 bp, Rhodococcus qingshengii; identical to SEQ ID NO: 63393
  source 1..40: mol_type = genomic DNA

SEQ ID NO: 63489 - DNA, 40 bp, Rhodococcus qingshengii
  source 1..40: mol_type = genomic DNA
cgggtccgccgtactcggtagagccgtatgccgtcgtcat

SEQ ID NO: 63490 - DNA, 50 bp, Rhodococcus qingshengii
  source 1..50: mol_type = genomic DNA
tgtgggtagaccctggcacgtgtaagggccgtgtgcgagcagcactcatt

SEQ ID NO: 63491 - protein, 497 aa, Nitrosospira multiformis
MTRNSVTRCALYCRSSKDRSDISIDAQRRELQQLAKAKGYLITAEFVDAVESGKDDNRPGFQNLLREIKSKERQWSVVLMLDTSRLARNQYIAHAFKHECAKRGVTVIFSKTPELDGVSGIILPAVLHAMDEVHSFMSREKGLAGMAENVRQGYRAGGRAPIGYKLEFIPTGAIRDGEPVTKSRLVPSDLAPKVREYLKRRAAGGRRLSLARELGLELNSSSINGLEWNALTYAGHTVWNVHNEKSADGYVGGVKRRPREEWVIQKNTHEALITDAEAETILEKLNSGRVTNYKTKAKHLLTGILVTPDGELWHGNAHRYRAGSKNVNAEQIDSQVLEHISRDLQSPAFVKALTESARHSAQLTDDDVEGEEVRSEIKKLDAKINKLSELLSETTATEVLIQKIEEFANRRDSLCEQLTQLDAVRKQSKALREIRELDVKAMLESVSENLPDLDRDSLKDLLRGIVDRITLDHQTLACCIHYKIKLNLGELVASPGG

SEQ ID NO: 63492 - DNA, 50 bp, Nitrosospira multiformis
  source 1..50: mol_type = genomic DNA
tttgggggaattggtggcgtccccagggggattataccaattcccccacg

SEQ ID NO: 63493 - DNA, 40 bp, Nitrosospira multiformis
  source 1..40: mol_type = genomic DNA
gggatttcgtggcgtccccagggggattcgaacccccgta

SEQ ID NO: 63494 - DNA, 40 bp, Nitrosospira multiformis
  source 1..40: mol_type = genomic DNA
gggatttcgtggcgtccccgtggggattcgaacccccgta

SEQ ID NO: 63495 - DNA, 50 bp, Nitrosospira multiformis
  source 1..50: mol_type = genomic DNA
tttggaggtcactttggcatccctgtggagaatagagtggaggccctaca

SEQ ID NO: 63496 - protein, 461 aa, Agreia pratensis
MSTVIYARQSLDKDGQGTAVDRQLVECRALATTHGLTVSREFVDNDVSASKGVRPEFTKLLSLIQTGDVETIIVWHTDRLYRRVKDLVEIVETAEKNALRILTVRAGELDLTTPAGRMLAGMLGHAARYEVEQKGARQVASNAQRAKKGSWQFSNRPYGYERVNGAVRVVEGEADVIREAYRRYLAGETYYAIAENFNVRNIPTTNGGPWTVSQLRARLANPAYAGIRLYKGEEVAEGDWEALITRDDWEQFKSAKQRRKTPHTWSNRTKYLLSGIATCGVCGGRMMARPDYPRPKNGVAQPAKIAYACTSKWCVQRNQARVDELVESVLIARLSLPDASKLIRPKVDIEPMLAKSADLRQRKDDLALALAEGLLTMAAVREASGGLTKQIDALQRQISAADGDSKLVNLIQAKDVADHWHSKLTLAQRRGIIGTLTSVTIRKQKNTRVFDPEDVAIEWLS

SEQ ID NO: 63497 - DNA, 50 bp, Agreia pratensis
  source 1..50: mol_type = genomic DNA
tgcccttttctgtatcgggttgccagaccggggtgcgcaagagtagggta

SEQ ID NO: 63498 - DNA, 40 bp, Agreia pratensis
  source 1..40: mol_type = genomic DNA
tccccagatgatgatgaccagaccggccgtcatcagggtg

SEQ ID NO: 63499 - DNA, 40 bp, Agreia pratensis
  source 1..40: mol_type = genomic DNA
tccccagatgatgatgaccacaccggccgtcatcagggtg

SEQ ID NO: 63500 - DNA, 50 bp, Agreia pratensis
  source 1..50: mol_type = genomic DNA
ttacctttatgtgctcagagtgccacacagggttgcttggatgtagggat

SEQ ID NO: 63501 - protein, 484 aa, Anaerotignum lactatifermentans; identical to SEQ ID NO: 43636

SEQ ID NO: 63502 - DNA, 50 bp, Anaerotignum lactatifermentans; identical to SEQ ID NO: 43637
  source 1..50: mol_type = genomic DNA

SEQ ID NO: 63503 - DNA, 40 bp, Anaerotignum lactatifermentans
  source 1..40: mol_type = genomic DNA
ggttcaagtcctgtcatccgcatccaagaaaaaatgactt

SEQ ID NO: 63504 - DNA, 40 bp, Anaerotignum lactatifermentans
  source 1..40: mol_type = genomic DNA
ggttcaagtcctgtcatccacatccaagaaaaaatgactt

SEQ ID NO: 63505 - DNA, 50 bp, Anaerotignum lactatifermentans
  source 1..50: mol_type = genomic DNA
tgttaggctccaggctcattccagacaccagcccaacttggactgcaccc

SEQ ID NO: 63506 - protein, 486 aa, Cellulosimicrobium cellulans
MSRRRALAPVPDTPPRAVAYLRQSTYREESISLELQETACRDYAARHGYQIVAVEKDPGISGRTWNRPAVQRVMEMIESRDADVIVLWRWSRLSRNRKDWAIAADRVDVAGGRIESATEPNDTATAAGRFARGVMTELAAFESERISEQWKEVHTSRVARGLPPGGKLPWGWRWVDGAVRPDPETAPYIVEAYRRYLAGAGNRDLADWFNGSGVRPMHAKEWYFSTITQCLDSPIHAGLIAYHGQTLPGAHDGIIDVATWEAYRRERERRAGERQVKRRYLLSGIAHCPCGEPMLGFTQDKEGRPRTGRTRSPWSCYRCSSLGKPEGHGPWNISLRFVEPVVMDWLHQVAADVENKVPRAAARRDDAHRESQRIAREITALDAQLTALTGHLASGLVPEAAYVTTRDEILARRAELERGLAEAERLVLHVPDDPSAIAREALADWDTLPIETKRATLRQLIRTVLVDYEHRTAHVVPVWEPMHNEG

SEQ ID NO: 63507 - DNA, 50 bp, Cellulosimicrobium cellulans
  source 1..50: mol_type = genomic DNA
gcctatgcacaacgagggataacggacgttctcccatgctgcgcataggg

SEQ ID NO: 63508 - DNA, 40 bp, Cellulosimicrobium cellulans
  source 1..40: mol_type = genomic DNA
gctccacgtggtgatccccgacgtcacgcgcaccgcgtgg

SEQ ID NO: 63509 - DNA, 40 bp, Cellulosimicrobium cellulans
  source 1..40: mol_type = genomic DNA
gctccacgtggtgatccccgtcgtcacgcgcaccgcgtgg

SEQ ID NO: 63510 - DNA, 50 bp, Cellulosimicrobium cellulans
  source 1..50: mol_type = genomic DNA
tcctctgcagggagaagcatagctgtcgctcacccacctcccaccttggg

SEQ ID NO: 63511 - protein, 487 aa, Eggerthella lenta
MGGRAAIYARFSSHNQRGESIEIQVEKSRAYCAENDLRVVATYCDFAQTGTNTDRAEFQRMMADAKRGLFDFVVIYKVTRIMRNRDEMAMARIMLRRCRVEILYAGEDISDGSAGVLQLGMLEVLAEYESALDGERIRDGIQKNAERCMANGCVRYGWDIVDGRYVVNEEEAAAIRLGVRMVLSGKLVADVVRAWEPYRTKRGGKWRFQTVRRILMRRENGGEYRYAGVVVPGGMPAIVPMDDEERVIRMLEDSHRPRAKTEAWDFPLTGKLYDGRDGGLMTGTSGTGKSGRPYHYYRCRSCGRTVRRDVVEKRVADAVREALGSADSRERIARMLADAEEERADEKPLSETIKGELAKIETAFSNIWAAIESGIAPPGGKERIDALKQRQALLKDELRTAEALEAARLDYDRALFWLEGMAAAEVDDAQLLRTFVARVVLGGPDDDDGLRVAFTFDDSAGLGDNPSPPGAIDPGGEVFDRMNASST

SEQ ID NO: 63512 - DNA, 50 bp, Eggerthella lenta
  source 1..50: mol_type = genomic DNA
tgttcgaccgaatgaacgccagctccaccaactgttcagtaggcgaacat

SEQ ID NO: 63513 - DNA, 40 bp, Eggerthella lenta
  source 1..40: mol_type = genomic DNA
ggttcgatccccctatgctccaccatacgttattcatccg

SEQ ID NO: 63514 - DNA, 40 bp, Eggerthella lenta
  source 1..40: mol_type = genomic DNA
ggttcgatccccctatgcttaaccatacgttattcatccg

SEQ ID NO: 63515 - DNA, 50 bp, Eggerthella lenta
  source 1..50: mol_type = genomic DNA
tgtttaacctgcttaacttcagtttacccatctgtaaaatgggataacaa

SEQ ID NO: 63516 - protein, 497 aa, Rhodococcus sp B7740
MTISRAVIYARVSKAGRDGTSKSVDEQLTDCRAECARQGWPVGEEVEDRERGASEWSPGERPGFRRLFQVLRRGDVLVVWELSRLARNDEDRTALAAFCKQLEIPWHYAGRTYNADDPDDAFNLDINHAVSKKESAQTRKRVLRALSANAADGKWHGRTIYGYRGVRDPDTGKIVRRVPDEVTAPIVKEAAERVLTGESLRSIGLDFQSRGLLTANGSERWHGYTIRNMVMNPAYAGFRVHKGSLTQGNWEPILTEDEHVRLKAVLTDPVRTAHIPRGTPPRYLLSGIAKCGVCGIPLYKSANHGRPIYKCSGRPSHMARELSKVDAVVVQRILQAIEHYRIELVFVTAEHDDDDQPIDPAVQAVGEHLTEARELQQRLDAVYDQVAEGKVSATALARIEARLLPQIKTATDAAESAARVSDPAARILNTPAEDLWASWTLDEQREFIRSAADIVMLPAEGRTFDPDRIQITMHKNLRTQPEGFEHYGPLGDDDAPG

SEQ ID NO: 63517 - DNA, 50 bp, Rhodococcus sp B7740
  source 1..50: mol_type = genomic DNA
cgggtcctgtaagccccaatgaccgacgacgttacgctttaggtatacgc

SEQ ID NO: 63518 - DNA, 40 bp, Rhodococcus sp B7740
  source 1..40: mol_type = genomic DNA
aggatcgcggtggaccaccgacgatgacgaacacgatccg

SEQ ID NO: 63519 - DNA, 40 bp, Rhodococcus sp B7740
  source 1..40: mol_type = genomic DNA
aggatcgcggtggaccacccacgatgacgaacacgatccg

SEQ ID NO: 63520 - DNA, 50 bp, Rhodococcus sp B7740
  source 1..50: mol_type = genomic DNA
ctggtcctggcctacctgatgatccacaaggacatgaccctggtggacgc

SEQ ID NO: 63521 - protein, 493 aa, Corynebacterium imitans
MERQRELISRWAKDNGHEVVAWAEDGDVSGSVSPFDTPELGKFLTEDGSQGWDILVAWKLDRLARNSINLSKLFIWTQEHEKQLVCVAEHIDLSDWSGQMLANIIAGLAQGELEAITERALAGKKQLRKVGRFQGGVAPYGYQAVDREGGGKELIKDPEQQKVLQWIYKQALMNRPIAHIVRDLKDKEIPTARQEAGRGTKGWHYSTINTLLTSKVYLGWTMYEGKPVLDDHGEPIQRCEPSISIEDYNRIAELRASRRTRVATKAKISPLSGVIVCWECGENMHYNRYNGSESIFKYQCRRHDKTIYVSAREAHAALEEMFLDDVADLPILEKRLSTIGTTEESLEQARAAYAEITEFLPTAPDKATRASLFEQLTNLGNKIKGLESAVQSQDGVEWIDTGETYGERWEQLDTEGRRLLLTSAGIKFRARQLKPGSRWHRPIQEHEIILPPELKLLPKTKPVDLSTVHKLEQEEFMAGLSEEQRQQIEGARE

SEQ ID NO: 63522 - DNA, 50 bp, Corynebacterium imitans
  source 1..50: mol_type = genomic DNA
agtaatgtttaagcgcggtttgcatcgtcgtacagggcttgcgtactatc

SEQ ID NO: 63523 - DNA, 40 bp, Corynebacterium imitans
  source 1..40: mol_type = genomic DNA
agtcagtcgacgctgcgcatcgtcgtaccttgccatcagt

SEQ ID NO: 63524 - DNA, 40 bp, Corynebacterium imitans
  source 1..40: mol_type = genomic DNA
agtcagtcgacgctgcgcaaggtcgtaccttgccatcagt

SEQ ID NO: 63525 - DNA, 50 bp, Corynebacterium imitans
  source 1..50: mol_type = genomic DNA
agtgaaattagggagaggaatacaaggactgacagggctatcatactatc

SEQ ID NO: 63526 - protein, 521 aa, Mycobacterium avium
MGDLSCRGRRHPRRLDAGKTFSTSSSLPWKRRPEASRLLADVTSRDRGFDAVVIGEPARAFYGPQFALTFPVLTHYGVGLWVPEVGGAVDPGSEAHDLVMTLFGGMSKGERARIQMRVRTAMSALAQDTTRYLGGRPPYGYQLVDAGPHPNPAKASLGQRLHRLEPDPETAPTVERIYRMYADGAGLRFIAQQLTDDGVPSPSQYDPARNRHRDPRGWSHSAIRAILDNPAYRGIRVWGKQEKYEVLLNPDDVAAGYETRMRWRDRADWIAPDRRTHEELIPDELAQAVRLRMQARRGPGRVCSRESTEPYALRGLLFCAACGRRMQGAARPGKQTTRILYRCEFGKSRSVPVDLSDHPRTVYLREDAVTARLDEWIATLADPEDLARGQDVDPAAGPGYAALQRQLSEANAKVAALITAVESGVAVEDLTAALRQRTAERDELRARVERVERPRAMCAAEISELVKELGGLSVILGAATGAERAEVYASLGLRLDYDPHLRRVTATADLSRVAGCVRGGT

SEQ ID NO: 63527 - DNA, 50 bp, Mycobacterium avium; identical to SEQ ID NO: 442
  source 1..50: mol_type = genomic DNA

SEQ ID NO: 63528 - DNA, 40 bp, Mycobacterium avium
  source 1..40: mol_type = genomic DNA
gtgcgccatgcgtgtccgaggggggacttgaacccccacg

SEQ ID NO: 63529 - DNA, 40 bp, Mycobacterium avium
  source 1..40: mol_type = genomic DNA
gtgcgccatgcgtgtccgacaggggacttgaacccccacg

SEQ ID NO: 63530 - DNA, 50 bp, Mycobacterium avium
  source 1..50: mol_type = genomic DNA
tttcatgtccctggctgtgtgccacaggggtcttcttgcggtaggtcact

SEQ ID NO: 63531 - protein, 513 aa, Trueperella pyogenes
MKSTSSQPVRAAIYLRISLDREMDGLAIERQREDCEKLAQFRGWEVVETYVDQSISASDKTKKRPAYLRMVADYEAGLLDAIVCYDLDRLTRQPRELEDWIDRAESRGLLLVTANGDADLATDGGRMYARIKAAVARAEVERKGARQSRAHVQRARQGRPPKGVRPMGYTTAGELIPHEAEAVRAIYAAFLRGDSLHGIARALSGAQADGEGTGIPSLPLHTRTLVIERNARRRAEGKSPRPVPDDKPWSPSTVLGILRNPRYAGYSVYTSKDTRRLEAGESRRKALRDNLVKNENGELVLGQWEVIVEADQWWTVQNLLDDPARVTNRSGSTVRKHLGAGLFRCGECGEPVRTRSCYYSCKHGHLNRTRSAIDDFVRALVVERLKKKDLRRRKRQADPEVKDAFSKQIAQQRARIARAERDYDAEVIEGADLARIRAAARAEIARLEAERLASGTGTVLAPILGTPDPATAFLSAPIALQRTMIDTLMTVTLRRAKQGKKGFDPESVEITWK

SEQ ID NO: 63532 - DNA, 50 bp, Trueperella pyogenes
  source 1..50: mol_type = genomic DNA
gatgttcgtctcatgcgtaatgtggtcgagttccgtacggggcttacgtc

SEQ ID NO: 63533 - DNA, 40 bp, Trueperella pyogenes
  source 1..40: mol_type = genomic DNA
gatggccgacggcgacgtcgtggagttcgtgtttaacgtc

SEQ ID NO: 63534 - DNA, 40 bp, Trueperella pyogenes
  source 1..40: mol_type = genomic DNA
gatggccgacggcgacgtctgggagttcgtgtttaacgtc

SEQ ID NO: 63535 - DNA, 50 bp, Trueperella pyogenes
  source 1..50: mol_type = genomic DNA
catgtttgcagggtgccaaatatgtgccagttcagttatatgctgagttc

SEQ ID NO: 63536 - protein, 503 aa, Phascolarctobacterium succinatutens
MLRAVIYARFSSDMQREESIDAQVRACKNYCQSKGYLVIGQYVDEAKSGRELTKRDAYNQMLADALEDKFDIIIFHKIDRNSRNELNYYTTKDKLEKLGIRYEYAVQHIDASPEGQMMEGLLVSMAAYYSRNLSKETKKGLNENAYKAQFNGGTAPLGFRIVDKHYEIEPIEAEAVRLIFKLYLAGYSYIRICRELELAGCKKRNGKPFDKTCLYDILGNEKYIGRYTFNKTPRAKNGQARNSHSKRRPDDFIAIDNALPAIISKEDFAAVQAKRETNQRRFSSYKAVEPYLLSGKVICGYCGSAMSGHRVAPRNGEPYGYYYCLKKERVAGERCPQKYIRAEKLEKIAIRALEEEIFSEASMKKIAALMREGYAAMTNEADESRKALLQAKAAAEKKLDNLYAFIENGEVDEYSLARMKKIKDELAKIKARLCETSVKFSKILTEEEIFATLAAFKKDLESNADNSAKRFVVNLLINKITVRDNCATVEILPNMLTVYLVPR

SEQ ID NO: 63537 - DNA, 50 bp, Phascolarctobacterium succinatutens
  source 1..50: mol_type = genomic DNA
gcttactgtatatttggtgccgcggactcgaaattatattgaccgcaata

SEQ ID NO: 63538 - DNA, 40 bp, Phascolarctobacterium succinatutens
  source 1..40: mol_type = genomic DNA
aatttatgttggtgccgcggaccggaatcgaaccggtacg

SEQ ID NO: 63539 - DNA, 40 bp, Phascolarctobacterium succinatutens
  source 1..40: mol_type = genomic DNA
aatttatgttggtgccgcgccccggaatcgaaccggtacg

SEQ ID NO: 63540 - DNA, 50 bp, Phascolarctobacterium succinatutens
  source 1..50: mol_type = genomic DNA
actctctgtggattttgtgccatgccctagaaatcattgtcaaggcaatg

SEQ ID NO: 63541 - protein, 514 aa, Bifidobacterium breve
MKPTSSQPVRAAIYLRISLDREMDGLAIDRQREDCEKLAQFRGWEIVETYVDQSISASDKTKKRPAYLRMVADYEAGLLDAIVCYDLDRLTRQPRELEDWIDRAESRGLLLVTANGDADLGTDGGRMYARIKAAVARAEVERKGARQSRAHVQRARQGRPPKGVRPMGYTTAGELIPHEAEAVRAIYAAFLRGDSLHGIARALSGAQADGEVAGVPRVPLHSRTIVLERNARRQAEGKQPRPVPDDKPWSPSTVLGILRNPRYAGYSVYTSKGTRRQEAGESRRKALRDNLVKDENGELVLGQWEAIVEADQWWTVQNLLDDPARVTNRSGSTVRKHLGAGLYRCEVCGEPVRTRARYYSCNAGHLNRTRDAIDDFVRALVVARLQKKDLKRRKKQQADPEVKDAFSEQIAQQRARIARAERDYDAEVIEGADLARIRDAARTEIARLEAERLTSGTGTVLAPILGTPDPAAAFLAAPIALQRTMIDTLMTVTLKRAKQGKKGFDPESVEIVWK

SEQ ID NO: 63542 - DNA, 50 bp, Bifidobacterium breve
  source 1..50: mol_type = genomic DNA
aacgttagtcatgtccgtaatgtggtcgaattccgcacggggcttacgtc

SEQ ID NO: 63543 - DNA, 40 bp, Bifidobacterium breve
  source 1..40: mol_type = genomic DNA
gccgttgaatggggagtcggtcgagtgcagacggttgatc

SEQ ID NO: 63544 - DNA, 50 bp, Bifidobacterium breve; identical to SEQ ID NO: 63542
  source 1..50: mol_type = genomic DNA

SEQ ID NO: 63545 - DNA, 40 bp, Bifidobacterium breve
  source 1..40: mol_type = genomic DNA
gccctggtctggggagtctgtagagtgcattgtcttgaac

SEQ ID NO: 63546 - protein, 558 aa, Brachybacterium massiliense
MTLIDLPAGLDLSALRTLASGPKPAYEQVLPDGKVPAISYLRVSTKDQATRNGLEEGLSIPAQRDAAQRKADQLGAVIVAEFIEPGESGKTARRKALQEMLNYLAEHPVRYCIINKVDRIARNRLDDAIIHATLRQAGVTLVSVMENIDETPSGMLMHGIMASIAEFYSLNLAQEVTKGLVQKATIGGTPHKAPIGYLNIRTVDANGREVREVRLDPDRAELIRFAFTAYATGDWSLSRLARELETRGLTTRPTPSFPAKPVTTTALHKILTNPYYQGIVTFRDVTYPGTHDALVTPETFEQVQTILQQNHVVGDKPQKYDHYLKGSIYCGCGKKLMFERPRNHQGVAYDYFTCTGRRFKRNDCQRTAILTHRVEQAIETGYQDISISPGEAAQVQGVLGPVFDTLSESTSDEKKLLTGQKAKLEAEQVKLLQAHYADAIPIDLLKTEQDRIRASLQAITGRLDTLETTYDKAKVGLDAILGLLTDIGDVYAKAEPSERRMLNRALFDRIVIDDEDQATLEPAEAIQTILATSPRPHNERTLPRDDAGQGSNVQLYVE

SEQ ID NO: 63547 - DNA, 50 bp, Brachybacterium massiliense
  source 1..50: mol_type = genomic DNA
aggttcgaacgttcaactttacgtggaggtagcgcgacagtgttcgaacc

SEQ ID NO: 63548 - DNA, 40 bp, Brachybacterium massiliense
  source 1..40: mol_type = genomic DNA
gtctcacggtttctcgagtggagctaaggggattcgaacc

SEQ ID NO: 63549 - DNA, 50 bp, Brachybacterium massiliense
  source 1..50: mol_type = genomic DNA
aggttcgaacgttcaactttacgtgcaggtagcgcgacagtgttcgaacc

SEQ ID NO: 63550 - DNA, 40 bp, Brachybacterium massiliense
  source 1..40: mol_type = genomic DNA
gtctcacagctggttaagggcagagtaagggatttgaacc

SEQ ID NO: 63551 - protein, 486 aa, Rathayibacter tritici
MTRAAIYLRQSSDRDRTELGIDRQRARCTEEARRRGWTLVEEYVDNDVSATKPRAEGTAWHSMMKDARSRTVDAVIAVDMDRLLRTIRDLATLSETGLKVVTLDGEIDLTTADGEFRATMAAGLARFEGRRKAERQKRANDQRREAGTPTSGRVPYGYRWVTAKERVERGEPAAYELDAERAGDVRFIFDSFLAGVPLGSICRDLNAQGKRTLPSRSTPDGVPFRPTTVRRMLLSPYYAALLPLPKGDGKPYDQEAIMRADCVPGAWPAIVTPDEWAEAKTRLAHPERKTSPGPSRKWLLSGLALCGVCFEPIRAGGGEKGIHSYRCRSMAHFMRRGEPLDSFVERLVVARLSRPDASELLVDRGRGDLDELRAERRRLEASLDAVYDDWQDGIITTERKNRALKRANARIEEIDELTRTGANVDSLRAVVGAQDVQAAWDGLTLGHKRAVVETLLTLVVNSVGQGNRRQMSDEAMARTVEIRWHE

SEQ ID NO: 63552 - DNA, 50 bp, Rathayibacter tritici
  source 1..50: mol_type = genomic DNA
ttccgctccattgcaccaacggttgccgcgatcggtcgattagggcagac

SEQ ID NO: 63553 - DNA, 40 bp, Rathayibacter tritici
  source 1..40: mol_type = genomic DNA
gtacgcgatcgcgacgatggccgcggtcggtttcgccggg

SEQ ID NO: 63554 - DNA, 50 bp, Rathayibacter tritici
  source 1..50: mol_type = genomic DNA
ttccgctccattgcaccaacggttagcgcgatcggtcgattagggcagac

SEQ ID NO: 63555 - DNA, 40 bp, Rathayibacter tritici
  source 1..40: mol_type = genomic DNA
gaacgcgtttccgaagaagagcgcggaggacttggccgag

SEQ ID NO: 63556 - protein, 470 aa, Rhodococcus koreensis
MDRDGNEYGVDRQRGDVETFAAQRGWTIVEWFVDNDVSATSRKPRPRFEDMLRLVDEGGVDVIVARHMDRLLRKLAELEHVMNRCQPHGVTVVTTSDGVDTSTDGGRLVARILASVGQGEVERKSARQRSAVAQAATQGRWVGGRRAFGYEADGVTIRPDEAAAIREGYAAVLAGEPVTAVVRAWNAAGLSSTQNKRDGTPNTWAREGARDVLLNPRNAGLRRHRPEGANGTFRKDPEAFVVGKAEWPGIVDEDTWRAAVRVLVSPDRRREPLNAQALLTGVARCGACDDGASVHTGGARRHYRTYRCRQRPGHLARKADPIEEYVEAVIVERLSRPDALEVFAPEVEESTRDLSAEADTLRRRLKALAIDYADDAMTREQFRAVNDRVRTRLAELESDMASAGAADLVAPLVTSGDVAAAWAALSTPRKRAVIDALVTVTLHPLGRGRHSFTAESFAATIGIDWHNVDA

SEQ ID NO: 63557 - DNA, 50 bp, Rhodococcus koreensis
  source 1..50: mol_type = genomic DNA
gtccgctatccgcgtgcactagcggtggctagagcagtaatctagcggtt

SEQ ID NO: 63558 - DNA, 40 bp, Rhodococcus koreensis
  source 1..40: mol_type = genomic DNA
ggccgatcgcgcattacgagtggcgtggacggtgagcgat

SEQ ID NO: 63559 - DNA, 50 bp, Rhodococcus koreensis
  source 1..50: mol_type = genomic DNA
gtccgctatccgcgtgcactagcgagggctagagcagtaatctagcggtt

SEQ ID NO: 63560 - DNA, 40 bp, Rhodococcus koreensis
  source 1..40: mol_type = genomic DNA
ggtagatgcagcatttccaagggcatggccggtgtgctgt

SEQ ID NO: 63561 - protein, 504 aa, Cellulosimicrobium cellulans
MPKRAVVYVRLSDFRGDADPTLSPETQEEKCRAYCTAKGWDVVEVVRDLDVSGSDKGLRLDRPGLSRVRALLPSVDVVVFAKLDRLARNVIDFRTFAEEAETRGATLASVAESLDLSTAAGRFVATILAAFAEMEAAAIADRVRDSRAAKAQALRWGGAPPPYGYESVPHPEGKGRALVLKADEVAVIHEMADRVLGGEALTSIALDFNRRGIARRRGTWAASTVARILRNDATVGRLTHRGAPVLGEDGLPATPWPAALPPATWRTVRAVLDENAERVAGSRRPARKRASRLLSGFLYCETCNRPLALQTYKAGPTYVCKAKANAKPCATGGSVLAERVEEEVVGQFLRAVGRLPATRVVAAGDAEAVDRLAAANAALDDLARRLRDADDDETLALLTRRATLRALVDDLGKAAATPRVREEPTGRTVGEEWESADVLARRALLGRALDHVVVRPIGRGYHRRPVADRLVVVWHPDEPTVNDAGGESRHVPARVLAASGAAAE

SEQ ID NO: 63562 - DNA, 50 bp, Cellulosimicrobium cellulans
  source 1..50: mol_type = genomic DNA
gaccgtcctctcctctcatgaggcgagcatccggcgacgggatgacggtc

SEQ ID NO: 63563 - DNA, 40 bp, Cellulosimicrobium cellulans
  source 1..40: mol_type = genomic DNA
ggacgcgcggacccgtggcgagctcgaggcgcgccagtcc

SEQ ID NO: 63564 - DNA, 40 bp, Cellulosimicrobium cellulans; identical to SEQ ID NO: 63563
  source 1..40: mol_type = genomic DNA

SEQ ID NO: 63565 - DNA, 50 bp, Cellulosimicrobium cellulans
  source 1..50: mol_type = genomic DNA
ggctgacctctggccacatgaggagagaaacctgcagaatcatggctgta
